United States Patent Application Publication US 2026/0167953 A1 - sequence listing, part 4

SEQ ID NO: 62498 - DNA, 80 bp, synthetic construct; identical to SEQ ID NO: 10890
  source 1..80: mol_type = other DNA

SEQ ID NO: 62499 - DNA, 80 bp, synthetic construct; identical to SEQ ID NO: 27941
  source 1..80: mol_type = other DNA

SEQ ID NO: 62500 - DNA, 80 bp, synthetic construct; identical to SEQ ID NO: 27942
  source 1..80: mol_type = other DNA

SEQ ID NO: 62501 - DNA, 80 bp, synthetic construct; identical to SEQ ID NO: 10891
  source 1..80: mol_type = other DNA

SEQ ID NO: 62502 - DNA, 80 bp, synthetic construct; identical to SEQ ID NO: 27945
  source 1..80: mol_type = other DNA

SEQ ID NO: 62503 - DNA, 80 bp, synthetic construct; identical to SEQ ID NO: 27946
  source 1..80: mol_type = other DNA

SEQ ID NO: 62504 - DNA, 80 bp, synthetic construct; identical to SEQ ID NO: 10892
  source 1..80: mol_type = other DNA

SEQ ID NO: 62505 - DNA, 80 bp, synthetic construct; identical to SEQ ID NO: 27949
  source 1..80: mol_type = other DNA

SEQ ID NO: 62506 - DNA, 80 bp, synthetic construct; identical to SEQ ID NO: 27950
  source 1..80: mol_type = other DNA

SEQ ID NO: 62507 - DNA, 80 bp, synthetic construct; identical to SEQ ID NO: 10893
  source 1..80: mol_type = other DNA

SEQ ID NO: 62508 - DNA, 80 bp, synthetic construct; identical to SEQ ID NO: 27952
  source 1..80: mol_type = other DNA

SEQ ID NO: 62509 - DNA, 80 bp, synthetic construct; identical to SEQ ID NO: 27953
  source 1..80: mol_type = other DNA

SEQ ID NO: 62510 - DNA, 80 bp, synthetic construct; identical to SEQ ID NO: 10894
  source 1..80: mol_type = other DNA

SEQ ID NO: 62511 - DNA, 80 bp, synthetic construct; identical to SEQ ID NO: 27956
  source 1..80: mol_type = other DNA

SEQ ID NO: 62512 - DNA, 80 bp, synthetic construct; identical to SEQ ID NO: 27957
  source 1..80: mol_type = other DNA

SEQ ID NO: 62513 - DNA, 80 bp, synthetic construct; identical to SEQ ID NO: 27958
  source 1..80: mol_type = other DNA

SEQ ID NO: 62514 - DNA, 80 bp, synthetic construct; identical to SEQ ID NO: 10895
  source 1..80: mol_type = other DNA

SEQ ID NO: 62515 - DNA, 80 bp, synthetic construct; identical to SEQ ID NO: 27960
  source 1..80: mol_type = other DNA

SEQ ID NO: 62516 - DNA, 80 bp, synthetic construct; identical to SEQ ID NO: 27961
  source 1..80: mol_type = other DNA

SEQ ID NO: 62517 - DNA, 80 bp, synthetic construct; identical to SEQ ID NO: 27962
  source 1..80: mol_type = other DNA

SEQ ID NO: 62518 - DNA, 80 bp, synthetic construct; identical to SEQ ID NO: 10896
  source 1..80: mol_type = other DNA

SEQ ID NO: 62519 - DNA, 80 bp, synthetic construct; identical to SEQ ID NO: 27965
  source 1..80: mol_type = other DNA

SEQ ID NO: 62520 - DNA, 80 bp, synthetic construct; identical to SEQ ID NO: 27966
  source 1..80: mol_type = other DNA

SEQ ID NO: 62521 - DNA, 80 bp, synthetic construct; identical to SEQ ID NO: 27967
  source 1..80: mol_type = other DNA

SEQ ID NO: 62522 - DNA, 80 bp, synthetic construct; identical to SEQ ID NO: 27968
  source 1..80: mol_type = other DNA

SEQ ID NO: 62523 - DNA, 80 bp, synthetic construct; identical to SEQ ID NO: 27969
  source 1..80: mol_type = other DNA

SEQ ID NO: 62524 - DNA, 80 bp, synthetic construct; identical to SEQ ID NO: 27970
  source 1..80: mol_type = other DNA

SEQ ID NO: 62525 - DNA, 80 bp, synthetic construct; identical to SEQ ID NO: 27971
  source 1..80: mol_type = other DNA

SEQ ID NO: 62526 - DNA, 80 bp, synthetic construct; identical to SEQ ID NO: 10898
  source 1..80: mol_type = other DNA

SEQ ID NO: 62527 - DNA, 80 bp, synthetic construct; identical to SEQ ID NO: 27973
  source 1..80: mol_type = other DNA

SEQ ID NO: 62528 - DNA, 80 bp, synthetic construct; identical to SEQ ID NO: 27974
  source 1..80: mol_type = other DNA

SEQ ID NO: 62529 - DNA, 80 bp, synthetic construct; identical to SEQ ID NO: 10938
  source 1..80: mol_type = other DNA

SEQ ID NO: 62530 - DNA, 80 bp, synthetic construct; identical to SEQ ID NO: 27976
  source 1..80: mol_type = other DNA

SEQ ID NO: 62531 - DNA, 80 bp, synthetic construct; identical to SEQ ID NO: 10899
  source 1..80: mol_type = other DNA

SEQ ID NO: 62532 - DNA, 80 bp, synthetic construct; identical to SEQ ID NO: 27979
  source 1..80: mol_type = other DNA

SEQ ID NO: 62533 - DNA, 80 bp, synthetic construct; identical to SEQ ID NO: 10900
  source 1..80: mol_type = other DNA

SEQ ID NO: 62534 - DNA, 80 bp, synthetic construct; identical to SEQ ID NO: 27983
  source 1..80: mol_type = other DNA

SEQ ID NO: 62535 - DNA, 80 bp, synthetic construct; identical to SEQ ID NO: 10901
  source 1..80: mol_type = other DNA

SEQ ID NO: 62536 - DNA, 80 bp, synthetic construct; identical to SEQ ID NO: 27985
  source 1..80: mol_type = other DNA

SEQ ID NO: 62537 - DNA, 80 bp, synthetic construct; identical to SEQ ID NO: 27986
  source 1..80: mol_type = other DNA

SEQ ID NO: 62538 - DNA, 80 bp, synthetic construct; identical to SEQ ID NO: 27988
  source 1..80: mol_type = other DNA

SEQ ID NO: 62539 - DNA, 80 bp, synthetic construct; identical to SEQ ID NO: 10902
  source 1..80: mol_type = other DNA

SEQ ID NO: 62540 - DNA, 80 bp, synthetic construct; identical to SEQ ID NO: 27991
  source 1..80: mol_type = other DNA

SEQ ID NO: 62541 - DNA, 80 bp, synthetic construct; identical to SEQ ID NO: 10903
  source 1..80: mol_type = other DNA

SEQ ID NO: 62542 - DNA, 80 bp, synthetic construct; identical to SEQ ID NO: 27993
  source 1..80: mol_type = other DNA

SEQ ID NO: 62543 - DNA, 80 bp, synthetic construct; identical to SEQ ID NO: 27994
  source 1..80: mol_type = other DNA

SEQ ID NO: 62544 - DNA, 80 bp, synthetic construct; identical to SEQ ID NO: 27995
  source 1..80: mol_type = other DNA

SEQ ID NO: 62545 - DNA, 80 bp, synthetic construct; identical to SEQ ID NO: 27996
  source 1..80: mol_type = other DNA

SEQ ID NO: 62546 - DNA, 80 bp, synthetic construct; identical to SEQ ID NO: 10904
  source 1..80: mol_type = other DNA

SEQ ID NO: 62547 - DNA, 80 bp, synthetic construct; identical to SEQ ID NO: 27998
  source 1..80: mol_type = other DNA

SEQ ID NO: 62548 - DNA, 80 bp, synthetic construct; identical to SEQ ID NO: 27999
  source 1..80: mol_type = other DNA

SEQ ID NO: 62549 - DNA, 80 bp, synthetic construct; identical to SEQ ID NO: 10905
  source 1..80: mol_type = other DNA

SEQ ID NO: 62550 - DNA, 80 bp, synthetic construct; identical to SEQ ID NO: 28001
  source 1..80: mol_type = other DNA

SEQ ID NO: 62551 - DNA, 80 bp, synthetic construct; identical to SEQ ID NO: 28002
  source 1..80: mol_type = other DNA

SEQ ID NO: 62552 - DNA, 80 bp, synthetic construct; identical to SEQ ID NO: 28003
  source 1..80: mol_type = other DNA

SEQ ID NO: 62553 - DNA, 80 bp, synthetic construct; identical to SEQ ID NO: 10906
  source 1..80: mol_type = other DNA

SEQ ID NO: 62554 - DNA, 80 bp, synthetic construct; identical to SEQ ID NO: 28005
  source 1..80: mol_type = other DNA

SEQ ID NO: 62555 - DNA, 80 bp, synthetic construct; identical to SEQ ID NO: 28006
  source 1..80: mol_type = other DNA

SEQ ID NO: 62556 - DNA, 80 bp, synthetic construct; identical to SEQ ID NO: 28008
  source 1..80: mol_type = other DNA

SEQ ID NO: 62557 - DNA, 80 bp, synthetic construct; identical to SEQ ID NO: 28010
  source 1..80: mol_type = other DNA

SEQ ID NO: 62558 - DNA, 80 bp, synthetic construct; identical to SEQ ID NO: 28011
  source 1..80: mol_type = other DNA

SEQ ID NO: 62559 - DNA, 80 bp, synthetic construct; identical to SEQ ID NO: 28012
  source 1..80: mol_type = other DNA

SEQ ID NO: 62560 - DNA, 80 bp, synthetic construct; identical to SEQ ID NO: 10908
  source 1..80: mol_type = other DNA

SEQ ID NO: 62561 - DNA, 80 bp, synthetic construct; identical to SEQ ID NO: 28014
  source 1..80: mol_type = other DNA

SEQ ID NO: 62562 - DNA, 80 bp, synthetic construct; identical to SEQ ID NO: 28015
  source 1..80: mol_type = other DNA

SEQ ID NO: 62563 - DNA, 80 bp, synthetic construct; identical to SEQ ID NO: 10909
  source 1..80: mol_type = other DNA

SEQ ID NO: 62564 - DNA, 80 bp, synthetic construct; identical to SEQ ID NO: 28018
  source 1..80: mol_type = other DNA

SEQ ID NO: 62565 - DNA, 80 bp, synthetic construct; identical to SEQ ID NO: 28019
  source 1..80: mol_type = other DNA

SEQ ID NO: 62566 - DNA, 80 bp, synthetic construct; identical to SEQ ID NO: 28020
  source 1..80: mol_type = other DNA

SEQ ID NO: 62567 - DNA, 80 bp, synthetic construct; identical to SEQ ID NO: 10910
  source 1..80: mol_type = other DNA

SEQ ID NO: 62568 - DNA, 80 bp, synthetic construct; identical to SEQ ID NO: 28022
  source 1..80: mol_type = other DNA

SEQ ID NO: 62569 - DNA, 80 bp, synthetic construct; identical to SEQ ID NO: 28023
  source 1..80: mol_type = other DNA

SEQ ID NO: 62570 - DNA, 80 bp, synthetic construct; identical to SEQ ID NO: 10911
  source 1..80: mol_type = other DNA

SEQ ID NO: 62571 - DNA, 80 bp, synthetic construct; identical to SEQ ID NO: 28025
  source 1..80: mol_type = other DNA

SEQ ID NO: 62572 - DNA, 80 bp, synthetic construct; identical to SEQ ID NO: 28026
  source 1..80: mol_type = other DNA

SEQ ID NO: 62573 - DNA, 80 bp, synthetic construct; identical to SEQ ID NO: 28027
  source 1..80: mol_type = other DNA

SEQ ID NO: 62574 - DNA, 80 bp, synthetic construct; identical to SEQ ID NO: 10912
  source 1..80: mol_type = other DNA

SEQ ID NO: 62575 - DNA, 80 bp, synthetic construct; identical to SEQ ID NO: 28029
  source 1..80: mol_type = other DNA

SEQ ID NO: 62576 - DNA, 80 bp, synthetic construct; identical to SEQ ID NO: 28031
  source 1..80: mol_type = other DNA

SEQ ID NO: 62577 - DNA, 80 bp, synthetic construct; identical to SEQ ID NO: 28032
  source 1..80: mol_type = other DNA

SEQ ID NO: 62578 - DNA, 80 bp, synthetic construct; identical to SEQ ID NO: 28034
  source 1..80: mol_type = other DNA

SEQ ID NO: 62579 - DNA, 80 bp, synthetic construct; identical to SEQ ID NO: 28035
  source 1..80: mol_type = other DNA

SEQ ID NO: 62580 - DNA, 80 bp, synthetic construct; identical to SEQ ID NO: 10914
  source 1..80: mol_type = other DNA

SEQ ID NO: 62581 - DNA, 80 bp, synthetic construct; identical to SEQ ID NO: 28037
  source 1..80: mol_type = other DNA

SEQ ID NO: 62582 - DNA, 80 bp, synthetic construct; identical to SEQ ID NO: 28038
  source 1..80: mol_type = other DNA

SEQ ID NO: 62583 - DNA, 80 bp, synthetic construct; identical to SEQ ID NO: 28039
  source 1..80: mol_type = other DNA

SEQ ID NO: 62584 - DNA, 80 bp, synthetic construct; identical to SEQ ID NO: 10915
  source 1..80: mol_type = other DNA

SEQ ID NO: 62585 - DNA, 80 bp, synthetic construct; identical to SEQ ID NO: 28041
  source 1..80: mol_type = other DNA

SEQ ID NO: 62586 - DNA, 80 bp, synthetic construct; identical to SEQ ID NO: 28042
  source 1..80: mol_type = other DNA

SEQ ID NO: 62587 - DNA, 80 bp, synthetic construct; identical to SEQ ID NO: 28043
  source 1..80: mol_type = other DNA

SEQ ID NO: 62588 - DNA, 80 bp, synthetic construct; identical to SEQ ID NO: 10916
  source 1..80: mol_type = other DNA

SEQ ID NO: 62589 - DNA, 80 bp, synthetic construct; identical to SEQ ID NO: 28046
  source 1..80: mol_type = other DNA

SEQ ID NO: 62590 - DNA, 80 bp, synthetic construct; identical to SEQ ID NO: 28048
  source 1..80: mol_type = other DNA

SEQ ID NO: 62591 - DNA, 80 bp, synthetic construct; identical to SEQ ID NO: 10917
  source 1..80: mol_type = other DNA

SEQ ID NO: 62592 - DNA, 80 bp, synthetic construct; identical to SEQ ID NO: 28050
  source 1..80: mol_type = other DNA

SEQ ID NO: 62593 - DNA, 80 bp, synthetic construct; identical to SEQ ID NO: 10918
  source 1..80: mol_type = other DNA

SEQ ID NO: 62594 - DNA, 80 bp, synthetic construct; identical to SEQ ID NO: 28053
  source 1..80: mol_type = other DNA

SEQ ID NO: 62595 - DNA, 80 bp, synthetic construct; identical to SEQ ID NO: 28054
  source 1..80: mol_type = other DNA

SEQ ID NO: 62596 - DNA, 80 bp, synthetic construct; identical to SEQ ID NO: 28055
  source 1..80: mol_type = other DNA

SEQ ID NO: 62597 - DNA, 80 bp, synthetic construct; identical to SEQ ID NO: 10919
  source 1..80: mol_type = other DNA

SEQ ID NO: 62598 - DNA, 80 bp, synthetic construct; identical to SEQ ID NO: 28058
  source 1..80: mol_type = other DNA

SEQ ID NO: 62599 - DNA, 80 bp, synthetic construct; identical to SEQ ID NO: 28059
  source 1..80: mol_type = other DNA

SEQ ID NO: 62600 - DNA, 80 bp, synthetic construct; identical to SEQ ID NO: 28060
  source 1..80: mol_type = other DNA

SEQ ID NO: 62601 - DNA, 80 bp, synthetic construct; identical to SEQ ID NO: 28061
  source 1..80: mol_type = other DNA

SEQ ID NO: 62602 - DNA, 80 bp, synthetic construct; identical to SEQ ID NO: 10920
  source 1..80: mol_type = other DNA

SEQ ID NO: 62603 - DNA, 80 bp, synthetic construct; identical to SEQ ID NO: 28063
  source 1..80: mol_type = other DNA

SEQ ID NO: 62604 - DNA, 80 bp, synthetic construct; identical to SEQ ID NO: 28064
  source 1..80: mol_type = other DNA

SEQ ID NO: 62605 - DNA, 80 bp, synthetic construct; identical to SEQ ID NO: 28065
  source 1..80: mol_type = other DNA

SEQ ID NO: 62606 - DNA, 80 bp, synthetic construct; identical to SEQ ID NO: 10921
  source 1..80: mol_type = other DNA

SEQ ID NO: 62607 - DNA, 80 bp, synthetic construct; identical to SEQ ID NO: 28068
  source 1..80: mol_type = other DNA

SEQ ID NO: 62608 - DNA, 80 bp, synthetic construct; identical to SEQ ID NO: 10922
  source 1..80: mol_type = other DNA

SEQ ID NO: 62609 - DNA, 80 bp, synthetic construct; identical to SEQ ID NO: 28071
  source 1..80: mol_type = other DNA

SEQ ID NO: 62610 - DNA, 80 bp, synthetic construct; identical to SEQ ID NO: 28072
  source 1..80: mol_type = other DNA

SEQ ID NO: 62611 - DNA, 80 bp, synthetic construct; identical to SEQ ID NO: 28073
  source 1..80: mol_type = other DNA

SEQ ID NO: 62612 - DNA, 80 bp, synthetic construct; identical to SEQ ID NO: 10923
  source 1..80: mol_type = other DNA

SEQ ID NO: 62613 - DNA, 80 bp, synthetic construct; identical to SEQ ID NO: 28075
  source 1..80: mol_type = other DNA

SEQ ID NO: 62614 - DNA, 80 bp, synthetic construct; identical to SEQ ID NO: 28076
  source 1..80: mol_type = other DNA

SEQ ID NO: 62615 - DNA, 80 bp, synthetic construct; identical to SEQ ID NO: 10924
  source 1..80: mol_type = other DNA

SEQ ID NO: 62616 - DNA, 80 bp, synthetic construct; identical to SEQ ID NO: 28079
  source 1..80: mol_type = other DNA

SEQ ID NO: 62617 - DNA, 80 bp, synthetic construct; identical to SEQ ID NO: 28080
  source 1..80: mol_type = other DNA

SEQ ID NO: 62618 - DNA, 80 bp, synthetic construct; identical to SEQ ID NO: 10925
  source 1..80: mol_type = other DNA

SEQ ID NO: 62619 - DNA, 80 bp, synthetic construct; identical to SEQ ID NO: 28082
  source 1..80: mol_type = other DNA

SEQ ID NO: 62620 - DNA, 80 bp, synthetic construct; identical to SEQ ID NO: 28083
  source 1..80: mol_type = other DNA

SEQ ID NO: 62621 - DNA, 80 bp, synthetic construct; identical to SEQ ID NO: 28085
  source 1..80: mol_type = other DNA

SEQ ID NO: 62622 - DNA, 80 bp, synthetic construct; identical to SEQ ID NO: 10926
  source 1..80: mol_type = other DNA

SEQ ID NO: 62623 - DNA, 80 bp, synthetic construct; identical to SEQ ID NO: 28087
  source 1..80: mol_type = other DNA

SEQ ID NO: 62624 - DNA, 80 bp, synthetic construct; identical to SEQ ID NO: 10927
  source 1..80: mol_type = other DNA

SEQ ID NO: 62625 - DNA, 80 bp, synthetic construct; identical to SEQ ID NO: 28090
  source 1..80: mol_type = other DNA

SEQ ID NO: 62626 - DNA, 80 bp, synthetic construct; identical to SEQ ID NO: 28091
  source 1..80: mol_type = other DNA

SEQ ID NO: 62627 - DNA, 80 bp, synthetic construct; identical to SEQ ID NO: 10928
  source 1..80: mol_type = other DNA

SEQ ID NO: 62628 - DNA, 80 bp, synthetic construct; identical to SEQ ID NO: 28094
  source 1..80: mol_type = other DNA

SEQ ID NO: 62629 - DNA, 80 bp, synthetic construct; identical to SEQ ID NO: 28095
  source 1..80: mol_type = other DNA

SEQ ID NO: 62630 - DNA, 80 bp, synthetic construct; identical to SEQ ID NO: 28096
  source 1..80: mol_type = other DNA

SEQ ID NO: 62631 - DNA, 80 bp, synthetic construct; identical to SEQ ID NO: 28097
  source 1..80: mol_type = other DNA

SEQ ID NO: 62632 - DNA, 80 bp, synthetic construct; identical to SEQ ID NO: 10929
  source 1..80: mol_type = other DNA

SEQ ID NO: 62633 - DNA, 80 bp, synthetic construct; identical to SEQ ID NO: 28099
  source 1..80: mol_type = other DNA

SEQ ID NO: 62634 - DNA, 80 bp, synthetic construct; identical to SEQ ID NO: 28100
  source 1..80: mol_type = other DNA

SEQ ID NO: 62635 - DNA, 80 bp, synthetic construct; identical to SEQ ID NO: 10930
  source 1..80: mol_type = other DNA

SEQ ID NO: 62636 - DNA, 80 bp, synthetic construct; identical to SEQ ID NO: 28102
  source 1..80: mol_type = other DNA

SEQ ID NO: 62637 - DNA, 80 bp, synthetic construct; identical to SEQ ID NO: 28103
  source 1..80: mol_type = other DNA

SEQ ID NO: 62638 - DNA, 80 bp, synthetic construct; identical to SEQ ID NO: 28105
  source 1..80: mol_type = other DNA

SEQ ID NO: 62639 - DNA, 80 bp, synthetic construct; identical to SEQ ID NO: 10931
  source 1..80: mol_type = other DNA

SEQ ID NO: 62640 - DNA, 80 bp, synthetic construct; identical to SEQ ID NO: 28107
  source 1..80: mol_type = other DNA

SEQ ID NO: 62641 - DNA, 80 bp, synthetic construct; identical to SEQ ID NO: 28108
  source 1..80: mol_type = other DNA

SEQ ID NO: 62642 - DNA, 80 bp, synthetic construct; identical to SEQ ID NO: 10932
  source 1..80: mol_type = other DNA

SEQ ID NO: 62643 - DNA, 80 bp, synthetic construct; identical to SEQ ID NO: 28110
  source 1..80: mol_type = other DNA

SEQ ID NO: 62644 - DNA, 80 bp, synthetic construct; identical to SEQ ID NO: 28111
  source 1..80: mol_type = other DNA

SEQ ID NO: 62645 - DNA, 80 bp, synthetic construct; identical to SEQ ID NO: 28112
  source 1..80: mol_type = other DNA

SEQ ID NO: 62646 - DNA, 80 bp, synthetic construct; identical to SEQ ID NO: 10933
  source 1..80: mol_type = other DNA

SEQ ID NO: 62647 - DNA, 80 bp, synthetic construct; identical to SEQ ID NO: 28115
  source 1..80: mol_type = other DNA

SEQ ID NO: 62648 - DNA, 80 bp, synthetic construct; identical to SEQ ID NO: 28116
  source 1..80: mol_type = other DNA

SEQ ID NO: 62649 - DNA, 80 bp, synthetic construct; identical to SEQ ID NO: 28117
  source 1..80: mol_type = other DNA

SEQ ID NO: 62650 - DNA, 80 bp, synthetic construct; identical to SEQ ID NO: 10934
  source 1..80: mol_type = other DNA

SEQ ID NO: 62651 - DNA, 80 bp, synthetic construct; identical to SEQ ID NO: 28119
  source 1..80: mol_type = other DNA

SEQ ID NO: 62652 - DNA, 80 bp, synthetic construct; identical to SEQ ID NO: 28120
  source 1..80: mol_type = other DNA

SEQ ID NO: 62653 - DNA, 80 bp, synthetic construct; identical to SEQ ID NO: 10935
  source 1..80: mol_type = other DNA

SEQ ID NO: 62654 - DNA, 80 bp, synthetic construct; identical to SEQ ID NO: 28123
  source 1..80: mol_type = other DNA

SEQ ID NO: 62655 - DNA, 80 bp, synthetic construct; identical to SEQ ID NO: 10897
  source 1..80: mol_type = other DNA

SEQ ID NO: 62656 - DNA, 80 bp, synthetic construct; identical to SEQ ID NO: 10936
  source 1..80: mol_type = other DNA

SEQ ID NO: 62657 - DNA, 80 bp, synthetic construct; identical to SEQ ID NO: 28126
  source 1..80: mol_type = other DNA

SEQ ID NO: 62658 - DNA, 80 bp, synthetic construct; identical to SEQ ID NO: 28128
  source 1..80: mol_type = other DNA

SEQ ID NO: 62659 - DNA, 80 bp, synthetic construct; identical to SEQ ID NO: 10937
  source 1..80: mol_type = other DNA

SEQ ID NO: 62660 - DNA, 80 bp, synthetic construct; identical to SEQ ID NO: 28130
  source 1..80: mol_type = other DNA

SEQ ID NO: 62661 - DNA, 80 bp, synthetic construct; identical to SEQ ID NO: 28131
  source 1..80: mol_type = other DNA

SEQ ID NO: 62662 - DNA, 80 bp, synthetic construct; identical to SEQ ID NO: 28132
  source 1..80: mol_type = other DNA

SEQ ID NO: 62663 - DNA, 80 bp, synthetic construct; identical to SEQ ID NO: 28133
  source 1..80: mol_type = other DNA

SEQ ID NO: 62664 - DNA, 80 bp, synthetic construct; identical to SEQ ID NO: 28134
  source 1..80: mol_type = other DNA

SEQ ID NO: 62665 - DNA, 80 bp, synthetic construct; identical to SEQ ID NO: 28135
  source 1..80: mol_type = other DNA

SEQ ID NO: 62666 - DNA, 80 bp, synthetic construct; identical to SEQ ID NO: 28136
  source 1..80: mol_type = other DNA

SEQ ID NO: 62667 - DNA, 80 bp, synthetic construct; identical to SEQ ID NO: 28138
  source 1..80: mol_type = other DNA

SEQ ID NO: 62668 - DNA, 80 bp, synthetic construct; identical to SEQ ID NO: 10939
  source 1..80: mol_type = other DNA

SEQ ID NO: 62669 - DNA, 80 bp, synthetic construct; identical to SEQ ID NO: 28140
  source 1..80: mol_type = other DNA

SEQ ID NO: 62670 - DNA, 80 bp, synthetic construct; identical to SEQ ID NO: 28141
  source 1..80: mol_type = other DNA

SEQ ID NO: 62671 - DNA, 80 bp, synthetic construct; identical to SEQ ID NO: 28142
  source 1..80: mol_type = other DNA

SEQ ID NO: 62672 - DNA, 80 bp, synthetic construct; identical to SEQ ID NO: 10940
  source 1..80: mol_type = other DNA

SEQ ID NO: 62673 - DNA, 80 bp, synthetic construct; identical to SEQ ID NO: 28145
  source 1..80: mol_type = other DNA

SEQ ID NO: 62674 - DNA, 80 bp, synthetic construct; identical to SEQ ID NO: 28146
  source 1..80: mol_type = other DNA

SEQ ID NO: 62675 - DNA, 80 bp, synthetic construct; identical to SEQ ID NO: 10941
  source 1..80: mol_type = other DNA

SEQ ID NO: 62676 - DNA, 80 bp, synthetic construct; identical to SEQ ID NO: 28149
  source 1..80: mol_type = other DNA

SEQ ID NO: 62677 - DNA, 80 bp, synthetic construct; identical to SEQ ID NO: 28150
  source 1..80: mol_type = other DNA

SEQ ID NO: 62678 - DNA, 80 bp, synthetic construct; identical to SEQ ID NO: 10942
  source 1..80: mol_type = other DNA

SEQ ID NO: 62679 - DNA, 80 bp, synthetic construct; identical to SEQ ID NO: 28153
  source 1..80: mol_type = other DNA

SEQ ID NO: 62680 - DNA, 80 bp, synthetic construct; identical to SEQ ID NO: 28154
  source 1..80: mol_type = other DNA

SEQ ID NO: 62681 - DNA, 80 bp, synthetic construct; identical to SEQ ID NO: 28155
  source 1..80: mol_type = other DNA

SEQ ID NO: 62682 - DNA, 80 bp, synthetic construct; identical to SEQ ID NO: 10943
  source 1..80: mol_type = other DNA

SEQ ID NO: 62683 - DNA, 80 bp, synthetic construct; identical to SEQ ID NO: 28157
  source 1..80: mol_type = other DNA

SEQ ID NO: 62684 - DNA, 80 bp, synthetic construct; identical to SEQ ID NO: 28158
  source 1..80: mol_type = other DNA

SEQ ID NO: 62685 - DNA, 80 bp, synthetic construct; identical to SEQ ID NO: 10944
  source 1..80: mol_type = other DNA

SEQ ID NO: 62686 - DNA, 80 bp, synthetic construct; identical to SEQ ID NO: 28160
  source 1..80: mol_type = other DNA

SEQ ID NO: 62687 - DNA, 80 bp, synthetic construct; identical to SEQ ID NO: 28161
  source 1..80: mol_type = other DNA

SEQ ID NO: 62688 - DNA, 80 bp, synthetic construct; identical to SEQ ID NO: 28162
  source 1..80: mol_type = other DNA

SEQ ID NO: 62689 - DNA, 80 bp, synthetic construct; identical to SEQ ID NO: 10945
  source 1..80: mol_type = other DNA

SEQ ID NO: 62690 - DNA, 80 bp, synthetic construct; identical to SEQ ID NO: 28165
  source 1..80: mol_type = other DNA

SEQ ID NO: 62691 - DNA, 80 bp, synthetic construct; identical to SEQ ID NO: 28166
  source 1..80: mol_type = other DNA

SEQ ID NO: 62692 - DNA, 80 bp, synthetic construct; identical to SEQ ID NO: 10946
  source 1..80: mol_type = other DNA

SEQ ID NO: 62693 - DNA, 80 bp, synthetic construct; identical to SEQ ID NO: 28168
  source 1..80: mol_type = other DNA

SEQ ID NO: 62694 - DNA, 80 bp, synthetic construct; identical to SEQ ID NO: 28169
  source 1..80: mol_type = other DNA

SEQ ID NO: 62695 - DNA, 80 bp, synthetic construct; identical to SEQ ID NO: 28170
  source 1..80: mol_type = other DNA

SEQ ID NO: 62696 - DNA, 80 bp, synthetic construct; identical to SEQ ID NO: 10947
  source 1..80: mol_type = other DNA

SEQ ID NO: 62697 - DNA, 80 bp, synthetic construct; identical to SEQ ID NO: 28172
  source 1..80: mol_type = other DNA

SEQ ID NO: 62698 - DNA, 80 bp, synthetic construct; identical to SEQ ID NO: 28173
  source 1..80: mol_type = other DNA

SEQ ID NO: 62699 - DNA, 80 bp, synthetic construct; identical to SEQ ID NO: 10948
  source 1..80: mol_type = other DNA

SEQ ID NO: 62700 - DNA, 80 bp, synthetic construct; identical to SEQ ID NO: 28176
  source 1..80: mol_type = other DNA

SEQ ID NO: 62701 - DNA, 80 bp, synthetic construct; identical to SEQ ID NO: 28177
  source 1..80: mol_type = other DNA

SEQ ID NO: 62702 - DNA, 80 bp, synthetic construct; identical to SEQ ID NO: 28178
  source 1..80: mol_type = other DNA

SEQ ID NO: 62703 - DNA, 80 bp, synthetic construct; identical to SEQ ID NO: 10949
  source 1..80: mol_type = other DNA

SEQ ID NO: 62704 - DNA, 80 bp, synthetic construct; identical to SEQ ID NO: 28181
  source 1..80: mol_type = other DNA

SEQ ID NO: 62705 - DNA, 80 bp, synthetic construct; identical to SEQ ID NO: 28182
  source 1..80: mol_type = other DNA

SEQ ID NO: 62706 - DNA, 80 bp, synthetic construct; identical to SEQ ID NO: 10950
  source 1..80: mol_type = other DNA

SEQ ID NO: 62707 - DNA, 80 bp, synthetic construct; identical to SEQ ID NO: 28185
  source 1..80: mol_type = other DNA

SEQ ID NO: 62708 - DNA, 80 bp, synthetic construct; identical to SEQ ID NO: 10951
  source 1..80: mol_type = other DNA

SEQ ID NO: 62709 - DNA, 80 bp, synthetic construct; identical to SEQ ID NO: 28188
  source 1..80: mol_type = other DNA

SEQ ID NO: 62710 - DNA, 80 bp, synthetic construct; identical to SEQ ID NO: 28189
  source 1..80: mol_type = other DNA

SEQ ID NO: 62711 - DNA, 80 bp, synthetic construct; identical to SEQ ID NO: 28190
  source 1..80: mol_type = other DNA

SEQ ID NO: 62712 - DNA, 80 bp, synthetic construct; identical to SEQ ID NO: 28191
  source 1..80: mol_type = other DNA

SEQ ID NO: 62713 - DNA, 80 bp, synthetic construct; identical to SEQ ID NO: 28192
  source 1..80: mol_type = other DNA

SEQ ID NO: 62714 - DNA, 80 bp, synthetic construct; identical to SEQ ID NO: 28193
  source 1..80: mol_type = other DNA

SEQ ID NO: 62715 - DNA, 80 bp, synthetic construct; identical to SEQ ID NO: 28194
  source 1..80: mol_type = other DNA

SEQ ID NO: 62716 - DNA, 80 bp, synthetic construct; identical to SEQ ID NO: 10952
  source 1..80: mol_type = other DNA

SEQ ID NO: 62717 - DNA, 80 bp, synthetic construct; identical to SEQ ID NO: 28196
  source 1..80: mol_type = other DNA

SEQ ID NO: 62718 - DNA, 80 bp, synthetic construct; identical to SEQ ID NO: 28197
  source 1..80: mol_type = other DNA

SEQ ID NO: 62719 - DNA, 80 bp, synthetic construct; identical to SEQ ID NO: 10953
  source 1..80: mol_type = other DNA

SEQ ID NO: 62720 - DNA, 80 bp, synthetic construct; identical to SEQ ID NO: 28199
  source 1..80: mol_type = other DNA

SEQ ID NO: 62721 - DNA, 80 bp, synthetic construct; identical to SEQ ID NO: 28200
  source 1..80: mol_type = other DNA

SEQ ID NO: 62722 - DNA, 80 bp, synthetic construct; identical to SEQ ID NO: 28201
  source 1..80: mol_type = other DNA

SEQ ID NO: 62723 - DNA, 80 bp, synthetic construct; identical to SEQ ID NO: 10954
  source 1..80: mol_type = other DNA

SEQ ID NO: 62724 - DNA, 80 bp, synthetic construct; identical to SEQ ID NO: 28203
  source 1..80: mol_type = other DNA

SEQ ID NO: 62725 - DNA, 80 bp, synthetic construct; identical to SEQ ID NO: 28204
  source 1..80: mol_type = other DNA

SEQ ID NO: 62726 - DNA, 80 bp, synthetic construct; identical to SEQ ID NO: 28205
  source 1..80: mol_type = other DNA

SEQ ID NO: 62727 - DNA, 80 bp, synthetic construct; identical to SEQ ID NO: 10955
  source 1..80: mol_type = other DNA

SEQ ID NO: 62728 - DNA, 80 bp, synthetic construct; identical to SEQ ID NO: 28207
  source 1..80: mol_type = other DNA

SEQ ID NO: 62729 - DNA, 80 bp, synthetic construct; identical to SEQ ID NO: 28208
  source 1..80: mol_type = other DNA

SEQ ID NO: 62730 - DNA, 80 bp, synthetic construct; identical to SEQ ID NO: 28209
  source 1..80: mol_type = other DNA

SEQ ID NO: 62731 - DNA, 80 bp, synthetic construct; identical to SEQ ID NO: 10956
  source 1..80: mol_type = other DNA

SEQ ID NO: 62732 - DNA, 80 bp, synthetic construct; identical to SEQ ID NO: 28211
  source 1..80: mol_type = other DNA

SEQ ID NO: 62733 - DNA, 80 bp, synthetic construct; identical to SEQ ID NO: 28212
  source 1..80: mol_type = other DNA

SEQ ID NO: 62734 - DNA, 80 bp, synthetic construct; identical to SEQ ID NO: 10957
  source 1..80: mol_type = other DNA

SEQ ID NO: 62735 - DNA, 80 bp, synthetic construct; identical to SEQ ID NO: 28215
  source 1..80: mol_type = other DNA

SEQ ID NO: 62736 - DNA, 80 bp, synthetic construct; identical to SEQ ID NO: 28216
  source 1..80: mol_type = other DNA

SEQ ID NO: 62737 - DNA, 80 bp, synthetic construct; identical to SEQ ID NO: 10958
  source 1..80: mol_type = other DNA

SEQ ID NO: 62738 - DNA, 80 bp, synthetic construct; identical to SEQ ID NO: 28219
  source 1..80: mol_type = other DNA

SEQ ID NO: 62739 - DNA, 80 bp, synthetic construct; identical to SEQ ID NO: 28220
  source 1..80: mol_type = other DNA

SEQ ID NO: 62740 - DNA, 80 bp, synthetic construct; identical to SEQ ID NO: 10959
  source 1..80: mol_type = other DNA

SEQ ID NO: 62741 - DNA, 80 bp, synthetic construct; identical to SEQ ID NO: 28222
  source 1..80: mol_type = other DNA

SEQ ID NO: 62742 - DNA, 80 bp, synthetic construct; identical to SEQ ID NO: 28223
  source 1..80: mol_type = other DNA

SEQ ID NO: 62743 - DNA, 80 bp, synthetic construct; identical to SEQ ID NO: 28224
  source 1..80: mol_type = other DNA

SEQ ID NO: 62744 - DNA, 80 bp, synthetic construct; identical to SEQ ID NO: 28225
  source 1..80: mol_type = other DNA

SEQ ID NO: 62745 - DNA, 80 bp, synthetic construct; identical to SEQ ID NO: 10960
  source 1..80: mol_type = other DNA

SEQ ID NO: 62746 - DNA, 80 bp, synthetic construct; identical to SEQ ID NO: 28227
  source 1..80: mol_type = other DNA

SEQ ID NO: 62747 - DNA, 80 bp, synthetic construct; identical to SEQ ID NO: 28228
  source 1..80: mol_type = other DNA

SEQ ID NO: 62748 - DNA, 80 bp, synthetic construct; identical to SEQ ID NO: 28229
  source 1..80: mol_type = other DNA

SEQ ID NO: 62749 - DNA, 80 bp, synthetic construct; identical to SEQ ID NO: 10961
  source 1..80: mol_type = other DNA

SEQ ID NO: 62750 - DNA, 80 bp, synthetic construct; identical to SEQ ID NO: 28231
  source 1..80: mol_type = other DNA

SEQ ID NO: 62751 - DNA, 80 bp, synthetic construct; identical to SEQ ID NO: 28232
  source 1..80: mol_type = other DNA

SEQ ID NO: 62752 - DNA, 80 bp, synthetic construct; identical to SEQ ID NO: 10962
  source 1..80: mol_type = other DNA

SEQ ID NO: 62753 - DNA, 80 bp, synthetic construct; identical to SEQ ID NO: 28234
  source 1..80: mol_type = other DNA

SEQ ID NO: 62754 - DNA, 80 bp, synthetic construct; identical to SEQ ID NO: 28235
  source 1..80: mol_type = other DNA

SEQ ID NO: 62755 - DNA, 80 bp, synthetic construct; identical to SEQ ID NO: 28236
  source 1..80: mol_type = other DNA

SEQ ID NO: 62756 - DNA, 80 bp, synthetic construct; identical to SEQ ID NO: 28237
  source 1..80: mol_type = other DNA

SEQ ID NO: 62757 - DNA, 80 bp, synthetic construct; identical to SEQ ID NO: 28238
  source 1..80: mol_type = other DNA

SEQ ID NO: 62758 - DNA, 80 bp, synthetic construct; identical to SEQ ID NO: 10963
  source 1..80: mol_type = other DNA

SEQ ID NO: 62759 - DNA, 80 bp, synthetic construct; identical to SEQ ID NO: 28240
  source 1..80: mol_type = other DNA

SEQ ID NO: 62760 - DNA, 80 bp, synthetic construct; identical to SEQ ID NO: 28241
  source 1..80: mol_type = other DNA

SEQ ID NO: 62761 - DNA, 80 bp, synthetic construct; identical to SEQ ID NO: 10964
  source 1..80: mol_type = other DNA

SEQ ID NO: 62762 - DNA, 80 bp, synthetic construct; identical to SEQ ID NO: 28243
  source 1..80: mol_type = other DNA

SEQ ID NO: 62763 - DNA, 80 bp, synthetic construct; identical to SEQ ID NO: 28244
  source 1..80: mol_type = other DNA

SEQ ID NO: 62764 - DNA, 80 bp, synthetic construct; identical to SEQ ID NO: 28245
  source 1..80: mol_type = other DNA

SEQ ID NO: 62765 - DNA, 80 bp, synthetic construct; identical to SEQ ID NO: 10965
  source 1..80: mol_type = other DNA

SEQ ID NO: 62766 - DNA, 80 bp, synthetic construct; identical to SEQ ID NO: 28247
  source 1..80: mol_type = other DNA

SEQ ID NO: 62767 - DNA, 80 bp, synthetic construct; identical to SEQ ID NO: 28248
  source 1..80: mol_type = other DNA

SEQ ID NO: 62768 - DNA, 80 bp, synthetic construct; identical to SEQ ID NO: 28249
  source 1..80: mol_type = other DNA

SEQ ID NO: 62769 - DNA, 80 bp, synthetic construct; identical to SEQ ID NO: 28250
  source 1..80: mol_type = other DNA

SEQ ID NO: 62770 - DNA, 80 bp, synthetic construct; identical to SEQ ID NO: 10966
  source 1..80: mol_type = other DNA

SEQ ID NO: 62771 - DNA, 80 bp, synthetic construct; identical to SEQ ID NO: 28252
  source 1..80: mol_type = other DNA

SEQ ID NO: 62772 - DNA, 80 bp, synthetic construct; identical to SEQ ID NO: 28253
  source 1..80: mol_type = other DNA

SEQ ID NO: 62773 - DNA, 80 bp, synthetic construct; identical to SEQ ID NO: 10967
  source 1..80: mol_type = other DNA

SEQ ID NO: 62774 - DNA, 80 bp, synthetic construct; identical to SEQ ID NO: 28255
  source 1..80: mol_type = other DNA

SEQ ID NO: 62775 - DNA, 80 bp, synthetic construct; identical to SEQ ID NO: 28256
  source 1..80: mol_type = other DNA

SEQ ID NO: 62776 - DNA, 80 bp, synthetic construct; identical to SEQ ID NO: 28257
  source 1..80: mol_type = other DNA

SEQ ID NO: 62777 - DNA, 80 bp, synthetic construct; identical to SEQ ID NO: 28258
  source 1..80: mol_type = other DNA

SEQ ID NO: 62778 - DNA, 80 bp, synthetic construct; identical to SEQ ID NO: 10968
  source 1..80: mol_type = other DNA

SEQ ID NO: 62779 - DNA, 80 bp, synthetic construct; identical to SEQ ID NO: 28260
  source 1..80: mol_type = other DNA

SEQ ID NO: 62780 - DNA, 80 bp, synthetic construct; identical to SEQ ID NO: 28261
  source 1..80: mol_type = other DNA

SEQ ID NO: 62781 - DNA, 80 bp, synthetic construct; identical to SEQ ID NO: 28262
  source 1..80: mol_type = other DNA

SEQ ID NO: 62782 - DNA, 80 bp, synthetic construct; identical to SEQ ID NO: 10969
  source 1..80: mol_type = other DNA

SEQ ID NO: 62783 - DNA, 80 bp, synthetic construct; identical to SEQ ID NO: 28264
  source 1..80: mol_type = other DNA

SEQ ID NO: 62784 - DNA, 80 bp, synthetic construct; identical to SEQ ID NO: 28265
  source 1..80: mol_type = other DNA

SEQ ID NO: 62785 - DNA, 80 bp, synthetic construct; identical to SEQ ID NO: 10970
  source 1..80: mol_type = other DNA

SEQ ID NO: 62786 - DNA, 80 bp, synthetic construct; identical to SEQ ID NO: 28267
  source 1..80: mol_type = other DNA

SEQ ID NO: 62787 - DNA, 80 bp, synthetic construct; identical to SEQ ID NO: 28268
  source 1..80: mol_type = other DNA

SEQ ID NO: 62788 - DNA, 80 bp, synthetic construct; identical to SEQ ID NO: 28270
  source 1..80: mol_type = other DNA

SEQ ID NO: 62789 - DNA, 80 bp, synthetic construct; identical to SEQ ID NO: 10971
  source 1..80: mol_type = other DNA

SEQ ID NO: 62790 - DNA, 80 bp, synthetic construct; identical to SEQ ID NO: 28272
  source 1..80: mol_type = other DNA

SEQ ID NO: 62791 - DNA, 80 bp, synthetic construct; identical to SEQ ID NO: 28273
  source 1..80: mol_type = other DNA

SEQ ID NO: 62792 - DNA, 80 bp, synthetic construct; identical to SEQ ID NO: 10972
  source 1..80: mol_type = other DNA

SEQ ID NO: 62793 - DNA, 80 bp, synthetic construct; identical to SEQ ID NO: 28275
  source 1..80: mol_type = other DNA

SEQ ID NO: 62794 - DNA, 80 bp, synthetic construct; identical to SEQ ID NO: 28276
  source 1..80: mol_type = other DNA

SEQ ID NO: 62795 - DNA, 80 bp, synthetic construct; identical to SEQ ID NO: 28277
  source 1..80: mol_type = other DNA

SEQ ID NO: 62796 - DNA, 80 bp, synthetic construct; identical to SEQ ID NO: 10973
  source 1..80: mol_type = other DNA

SEQ ID NO: 62797 - DNA, 80 bp, synthetic construct; identical to SEQ ID NO: 28279
  source 1..80: mol_type = other DNA

SEQ ID NO: 62798 - DNA, 80 bp, synthetic construct; identical to SEQ ID NO: 28280
  source 1..80: mol_type = other DNA

SEQ ID NO: 62799 - DNA, 80 bp, synthetic construct; identical to SEQ ID NO: 10974
  source 1..80: mol_type = other DNA

SEQ ID NO: 62800 - DNA, 80 bp, synthetic construct; identical to SEQ ID NO: 28282
  source 1..80: mol_type = other DNA

SEQ ID NO: 62801 - DNA, 80 bp, synthetic construct; identical to SEQ ID NO: 28283
  source 1..80: mol_type = other DNA

SEQ ID NO: 62802 - DNA, 80 bp, synthetic construct; identical to SEQ ID NO: 28284
  source 1..80: mol_type = other DNA

SEQ ID NO: 62803 - DNA, 80 bp, synthetic construct; identical to SEQ ID NO: 10975
  source 1..80: mol_type = other DNA

SEQ ID NO: 62804 - DNA, 80 bp, synthetic construct; identical to SEQ ID NO: 28286
  source 1..80: mol_type = other DNA

SEQ ID NO: 62805 - DNA, 80 bp, synthetic construct; identical to SEQ ID NO: 28287
  source 1..80: mol_type = other DNA

SEQ ID NO: 62806 - DNA, 80 bp, synthetic construct; identical to SEQ ID NO: 28288
  source 1..80: mol_type = other DNA

SEQ ID NO: 62807 - DNA, 80 bp, synthetic construct; identical to SEQ ID NO: 10976
  source 1..80: mol_type = other DNA

SEQ ID NO: 62808 - DNA, 80 bp, synthetic construct; identical to SEQ ID NO: 28290
  source 1..80: mol_type = other DNA

SEQ ID NO: 62809 - DNA, 80 bp, synthetic construct; identical to SEQ ID NO: 28291
  source 1..80: mol_type = other DNA

SEQ ID NO: 62810 - DNA, 80 bp, synthetic construct; identical to SEQ ID NO: 28292
  source 1..80: mol_type = other DNA

SEQ ID NO: 62811 - DNA, 80 bp, synthetic construct; identical to SEQ ID NO: 10977
  source 1..80: mol_type = other DNA

SEQ ID NO: 62812 - DNA, 80 bp, synthetic construct; identical to SEQ ID NO: 28295
  source 1..80: mol_type = other DNA

SEQ ID NO: 62813 - DNA, 80 bp, synthetic construct; identical to SEQ ID NO: 28296
  source 1..80: mol_type = other DNA

SEQ ID NO: 62814 - DNA, 80 bp, synthetic construct; identical to SEQ ID NO: 28297
  source 1..80: mol_type = other DNA

SEQ ID NO: 62815 - DNA, 80 bp, synthetic construct; identical to SEQ ID NO: 10978
  source 1..80: mol_type = other DNA

SEQ ID NO: 62816 - DNA, 80 bp, synthetic construct; identical to SEQ ID NO: 28299
  source 1..80: mol_type = other DNA

SEQ ID NO: 62817 - DNA, 80 bp, synthetic construct; identical to SEQ ID NO: 28300
  source 1..80: mol_type = other DNA

SEQ ID NO: 62818 - DNA, 80 bp, synthetic construct; identical to SEQ ID NO: 28301
  source 1..80: mol_type = other DNA

SEQ ID NO: 62819 - DNA, 80 bp, synthetic construct; identical to SEQ ID NO: 10979
  source 1..80: mol_type = other DNA

SEQ ID NO: 62820 - DNA, 80 bp, synthetic construct; identical to SEQ ID NO: 28303
  source 1..80: mol_type = other DNA

SEQ ID NO: 62821 - DNA, 80 bp, synthetic construct; identical to SEQ ID NO: 28304
  source 1..80: mol_type = other DNA

SEQ ID NO: 62822 - DNA, 80 bp, synthetic construct; identical to SEQ ID NO: 28305
  source 1..80: mol_type = other DNA

SEQ ID NO: 62823 - DNA, 80 bp, synthetic construct; identical to SEQ ID NO: 10980
  source 1..80: mol_type = other DNA

SEQ ID NO: 62824 - DNA, 80 bp, synthetic construct; identical to SEQ ID NO: 28307
  source 1..80: mol_type = other DNA

SEQ ID NO: 62825 - DNA, 80 bp, synthetic construct; identical to SEQ ID NO: 28308
  source 1..80: mol_type = other DNA

SEQ ID NO: 62826 - DNA, 80 bp, synthetic construct; identical to SEQ ID NO: 10981
  source 1..80: mol_type = other DNA

SEQ ID NO: 62827 - DNA, 80 bp, synthetic construct; identical to SEQ ID NO: 28310
  source 1..80: mol_type = other DNA

SEQ ID NO: 62828 - DNA, 80 bp, synthetic construct; identical to SEQ ID NO: 28311
  source 1..80: mol_type = other DNA

SEQ ID NO: 62829 - DNA, 80 bp, synthetic construct; identical to SEQ ID NO: 28312
  source 1..80: mol_type = other DNA

SEQ ID NO: 62830 - DNA, 80 bp, synthetic construct; identical to SEQ ID NO: 28313
  source 1..80: mol_type = other DNA

SEQ ID NO: 62831 - DNA, 80 bp, synthetic construct; identical to SEQ ID NO: 10982
  source 1..80: mol_type = other DNA

SEQ ID NO: 62832 - DNA, 80 bp, synthetic construct; identical to SEQ ID NO: 28316
  source 1..80: mol_type = other DNA

SEQ ID NO: 62833 - DNA, 80 bp, synthetic construct; identical to SEQ ID NO: 10983
  source 1..80: mol_type = other DNA

SEQ ID NO: 62834 - DNA, 80 bp, synthetic construct; identical to SEQ ID NO: 28318
  source 1..80: mol_type = other DNA

SEQ ID NO: 62835 - DNA, 80 bp, synthetic construct; identical to SEQ ID NO: 28319
  source 1..80: mol_type = other DNA

SEQ ID NO: 62836 - DNA, 80 bp, synthetic construct; identical to SEQ ID NO: 28320
  source 1..80: mol_type = other DNA

SEQ ID NO: 62837 - DNA, 80 bp, synthetic construct; identical to SEQ ID NO: 10984
  source 1..80: mol_type = other DNA

SEQ ID NO: 62838 - DNA, 80 bp, synthetic construct; identical to SEQ ID NO: 28322
  source 1..80: mol_type = other DNA

SEQ ID NO: 62839 - DNA, 80 bp, synthetic construct; identical to SEQ ID NO: 28323
  source 1..80: mol_type = other DNA

SEQ ID NO: 62840 - DNA, 80 bp, synthetic construct; identical to SEQ ID NO: 28324
  source 1..80: mol_type = other DNA

SEQ ID NO: 62841 - DNA, 80 bp, synthetic construct; identical to SEQ ID NO: 10985
  source 1..80: mol_type = other DNA

SEQ ID NO: 62842 - DNA, 80 bp, synthetic construct; identical to SEQ ID NO: 28326
  source 1..80: mol_type = other DNA

SEQ ID NO: 62843 - DNA, 80 bp, synthetic construct; identical to SEQ ID NO: 28327
  source 1..80: mol_type = other DNA

SEQ ID NO: 62844 - DNA, 80 bp, synthetic construct; identical to SEQ ID NO: 10986
  source 1..80: mol_type = other DNA

SEQ ID NO: 62845 - DNA, 80 bp, synthetic construct; identical to SEQ ID NO: 28329
  source 1..80: mol_type = other DNA

SEQ ID NO: 62846 - DNA, 80 bp, synthetic construct; identical to SEQ ID NO: 28330
  source 1..80: mol_type = other DNA

SEQ ID NO: 62847 - DNA, 80 bp, synthetic construct; identical to SEQ ID NO: 28331
  source 1..80: mol_type = other DNA

SEQ ID NO: 62848 - DNA, 80 bp, synthetic construct; identical to SEQ ID NO: 10987
  source 1..80: mol_type = other DNA

SEQ ID NO: 62849 - DNA, 80 bp, synthetic construct; identical to SEQ ID NO: 28333
  source 1..80: mol_type = other DNA

SEQ ID NO: 62850 - DNA, 80 bp, synthetic construct; identical to SEQ ID NO: 28334
  source 1..80: mol_type = other DNA

SEQ ID NO: 62851 - DNA, 80 bp, synthetic construct; identical to SEQ ID NO: 10988
  source 1..80: mol_type = other DNA

SEQ ID NO: 62852 - DNA, 80 bp, synthetic construct; identical to SEQ ID NO: 28336
  source 1..80: mol_type = other DNA

SEQ ID NO: 62853 - DNA, 80 bp, synthetic construct; identical to SEQ ID NO: 28337
  source 1..80: mol_type = other DNA

SEQ ID NO: 62854 - DNA, 80 bp, synthetic construct; identical to SEQ ID NO: 28338
  source 1..80: mol_type = other DNA

SEQ ID NO: 62855 - DNA, 80 bp, synthetic construct; identical to SEQ ID NO: 28339
  source 1..80: mol_type = other DNA

SEQ ID NO: 62856 - DNA, 80 bp, synthetic construct; identical to SEQ ID NO: 10989
  source 1..80: mol_type = other DNA

SEQ ID NO: 62857 - DNA, 80 bp, synthetic construct; identical to SEQ ID NO: 28341
  source 1..80: mol_type = other DNA

SEQ ID NO: 62858 - DNA, 80 bp, synthetic construct; identical to SEQ ID NO: 28342
  source 1..80: mol_type = other DNA

SEQ ID NO: 62859 - DNA, 80 bp, synthetic construct; identical to SEQ ID NO: 28343
  source 1..80: mol_type = other DNA

SEQ ID NO: 62860 - DNA, 80 bp, synthetic construct; identical to SEQ ID NO: 10990
  source 1..80: mol_type = other DNA

SEQ ID NO: 62861 - DNA, 80 bp, synthetic construct; identical to SEQ ID NO: 28345
  source 1..80: mol_type = other DNA

SEQ ID NO: 62862 - DNA, 80 bp, synthetic construct; identical to SEQ ID NO: 28346
  source 1..80: mol_type = other DNA

SEQ ID NO: 62863 - DNA, 80 bp, synthetic construct; identical to SEQ ID NO: 10991
  source 1..80: mol_type = other DNA

SEQ ID NO: 62864 - DNA, 80 bp, synthetic construct; identical to SEQ ID NO: 28348
  source 1..80: mol_type = other DNA

SEQ ID NO: 62865 - DNA, 80 bp, synthetic construct; identical to SEQ ID NO: 28349
  source 1..80: mol_type = other DNA

SEQ ID NO: 62866 - DNA, 80 bp, synthetic construct; identical to SEQ ID NO: 28350
  source 1..80: mol_type = other DNA

SEQ ID NO: 62867 - DNA, 80 bp, synthetic construct; identical to SEQ ID NO: 28351
  source 1..80: mol_type = other DNA

SEQ ID NO: 62868 - DNA, 80 bp, synthetic construct; identical to SEQ ID NO: 10992
  source 1..80: mol_type = other DNA

SEQ ID NO: 62869 - DNA, 80 bp, synthetic construct; identical to SEQ ID NO: 28353
  source 1..80: mol_type = other DNA

SEQ ID NO: 62870 - DNA, 80 bp, synthetic construct; identical to SEQ ID NO: 28354
  source 1..80: mol_type = other DNA

SEQ ID NO: 62871 - DNA, 80 bp, synthetic construct; identical to SEQ ID NO: 28355
  source 1..80: mol_type = other DNA

SEQ ID NO: 62872 - DNA, 80 bp, synthetic construct; identical to SEQ ID NO: 10993
  source 1..80: mol_type = other DNA

SEQ ID NO: 62873 - DNA, 80 bp, synthetic construct; identical to SEQ ID NO: 28357
  source 1..80: mol_type = other DNA

SEQ ID NO: 62874 - DNA, 80 bp, synthetic construct; identical to SEQ ID NO: 28358
  source 1..80: mol_type = other DNA

SEQ ID NO: 62875 - DNA, 80 bp, synthetic construct; identical to SEQ ID NO: 10994
  source 1..80: mol_type = other DNA

SEQ ID NO: 62876 - DNA, 80 bp, synthetic construct; identical to SEQ ID NO: 28361
  source 1..80: mol_type = other DNA

SEQ ID NO: 62877 - DNA, 80 bp, synthetic construct; identical to SEQ ID NO: 28362
  source 1..80: mol_type = other DNA

SEQ ID NO: 62878 - DNA, 80 bp, synthetic construct; identical to SEQ ID NO: 28363
  source 1..80: mol_type = other DNA

SEQ ID NO: 62879 - DNA, 80 bp, synthetic construct; identical to SEQ ID NO: 10995
  source 1..80: mol_type = other DNA

SEQ ID NO: 62880 - DNA, 80 bp, synthetic construct; identical to SEQ ID NO: 28365
  source 1..80: mol_type = other DNA

SEQ ID NO: 62881 - DNA, 80 bp, synthetic construct; identical to SEQ ID NO: 28366
  source 1..80: mol_type = other DNA

SEQ ID NO: 62882 - DNA, 80 bp, synthetic construct; identical to SEQ ID NO: 10996
  source 1..80: mol_type = other DNA

SEQ ID NO: 62883 - DNA, 80 bp, synthetic construct; identical to SEQ ID NO: 28368
  source 1..80: mol_type = other DNA

SEQ ID NO: 62884 - DNA, 80 bp, synthetic construct; identical to SEQ ID NO: 28369
  source 1..80: mol_type = other DNA

SEQ ID NO: 62885 - DNA, 80 bp, synthetic construct; identical to SEQ ID NO: 28370
  source 1..80: mol_type = other DNA

SEQ ID NO: 62886 - DNA, 80 bp, synthetic construct; identical to SEQ ID NO: 28371
  source 1..80: mol_type = other DNA

SEQ ID NO: 62887 - DNA, 80 bp, synthetic construct; identical to SEQ ID NO: 10997
  source 1..80: mol_type = other DNA

SEQ ID NO: 62888 - DNA, 80 bp, synthetic construct; identical to SEQ ID NO: 28373
  source 1..80: mol_type = other DNA

SEQ ID NO: 62889 - DNA, 80 bp, synthetic construct; identical to SEQ ID NO: 28375
  source 1..80: mol_type = other DNA

SEQ ID NO: 62890 - DNA, 80 bp, synthetic construct; identical to SEQ ID NO: 10998
  source 1..80: mol_type = other DNA

SEQ ID NO: 62891 - DNA, 80 bp, synthetic construct; identical to SEQ ID NO: 28377
  source 1..80: mol_type = other DNA

SEQ ID NO: 62892 - DNA, 80 bp, synthetic construct; identical to SEQ ID NO: 28378
  source 1..80: mol_type = other DNA

SEQ ID NO: 62893 - DNA, 80 bp, synthetic construct; identical to SEQ ID NO: 28379
  source 1..80: mol_type = other DNA

SEQ ID NO: 62894 - DNA, 80 bp, synthetic construct; identical to SEQ ID NO: 10999
  source 1..80: mol_type = other DNA

SEQ ID NO: 62895 - DNA, 80 bp, synthetic construct; identical to SEQ ID NO: 28381
  source 1..80: mol_type = other DNA

SEQ ID NO: 62896 - DNA, 80 bp, synthetic construct; identical to SEQ ID NO: 28382
  source 1..80: mol_type = other DNA

SEQ ID NO: 62897 - DNA, 80 bp, synthetic construct; identical to SEQ ID NO: 28383
  source 1..80: mol_type = other DNA

SEQ ID NO: 62898 - DNA, 80 bp, synthetic construct; identical to SEQ ID NO: 11000
  source 1..80: mol_type = other DNA

SEQ ID NO: 62899 - DNA, 80 bp, synthetic construct; identical to SEQ ID NO: 28385
  source 1..80: mol_type = other DNA

SEQ ID NO: 62900 - DNA, 80 bp, synthetic construct; identical to SEQ ID NO: 28386
  source 1..80: mol_type = other DNA

SEQ ID NO: 62901 - DNA, 80 bp, synthetic construct; identical to SEQ ID NO: 11001
  source 1..80: mol_type = other DNA

SEQ ID NO: 62902 - DNA, 80 bp, synthetic construct; identical to SEQ ID NO: 28388
  source 1..80: mol_type = other DNA

SEQ ID NO: 62903 - DNA, 80 bp, synthetic construct; identical to SEQ ID NO: 28389
  source 1..80: mol_type = other DNA

SEQ ID NO: 62904 - DNA, 80 bp, synthetic construct; identical to SEQ ID NO: 28390
  source 1..80: mol_type = other DNA

SEQ ID NO: 62905 - DNA, 80 bp, synthetic construct; identical to SEQ ID NO: 11002
  source 1..80: mol_type = other DNA

SEQ ID NO: 62906 - DNA, 80 bp, synthetic construct; identical to SEQ ID NO: 28392
  source 1..80: mol_type = other DNA

SEQ ID NO: 62907 - DNA, 80 bp, synthetic construct; identical to SEQ ID NO: 28393
  source 1..80: mol_type = other DNA

SEQ ID NO: 62908 - DNA, 80 bp, synthetic construct; identical to SEQ ID NO: 28394
  source 1..80: mol_type = other DNA

SEQ ID NO: 62909 - DNA, 80 bp, synthetic construct; identical to SEQ ID NO: 11003
  source 1..80: mol_type = other DNA

SEQ ID NO: 62910 - DNA, 80 bp, synthetic construct; identical to SEQ ID NO: 28396
  source 1..80: mol_type = other DNA

SEQ ID NO: 62911 - DNA, 80 bp, synthetic construct; identical to SEQ ID NO: 28397
  source 1..80: mol_type = other DNA

SEQ ID NO: 62912 - DNA, 80 bp, synthetic construct; identical to SEQ ID NO: 28398
  source 1..80: mol_type = other DNA

SEQ ID NO: 62913 - DNA, 80 bp, synthetic construct; identical to SEQ ID NO: 11004
  source 1..80: mol_type = other DNA

SEQ ID NO: 62914 - DNA, 80 bp, synthetic construct; identical to SEQ ID NO: 28400
  source 1..80: mol_type = other DNA

SEQ ID NO: 62915 - DNA, 80 bp, synthetic construct; identical to SEQ ID NO: 28401
  source 1..80: mol_type = other DNA

SEQ ID NO: 62916 - DNA, 80 bp, synthetic construct; identical to SEQ ID NO: 28402
  source 1..80: mol_type = other DNA

SEQ ID NO: 62917 - DNA, 80 bp, synthetic construct; identical to SEQ ID NO: 28403
  source 1..80: mol_type = other DNA

SEQ ID NO: 62918 - DNA, 80 bp, synthetic construct; identical to SEQ ID NO: 11005
  source 1..80: mol_type = other DNA

SEQ ID NO: 62919 - DNA, 80 bp, synthetic construct; identical to SEQ ID NO: 28405
  source 1..80: mol_type = other DNA

SEQ ID NO: 62920 - DNA, 80 bp, synthetic construct; identical to SEQ ID NO: 28406
  source 1..80: mol_type = other DNA

SEQ ID NO: 62921 - DNA, 80 bp, synthetic construct; identical to SEQ ID NO: 28407
  source 1..80: mol_type = other DNA

SEQ ID NO: 62922 - DNA, 80 bp, synthetic construct; identical to SEQ ID NO: 11006
  source 1..80: mol_type = other DNA

SEQ ID NO: 62923 - DNA, 80 bp, synthetic construct; identical to SEQ ID NO: 28409
  source 1..80: mol_type = other DNA

SEQ ID NO: 62924 - DNA, 80 bp, synthetic construct; identical to SEQ ID NO: 28410
  source 1..80: mol_type = other DNA

SEQ ID NO: 62925 - DNA, 80 bp, synthetic construct; identical to SEQ ID NO: 28411
  source 1..80: mol_type = other DNA

SEQ ID NO: 62926 - DNA, 80 bp, synthetic construct; identical to SEQ ID NO: 28412
  source 1..80: mol_type = other DNA

SEQ ID NO: 62927 - DNA, 80 bp, synthetic construct; identical to SEQ ID NO: 11007
  source 1..80: mol_type = other DNA

SEQ ID NO: 62928 - DNA, 80 bp, synthetic construct; identical to SEQ ID NO: 28414
  source 1..80: mol_type = other DNA

SEQ ID NO: 62929 - DNA, 80 bp, synthetic construct; identical to SEQ ID NO: 28415
  source 1..80: mol_type = other DNA

SEQ ID NO: 62930 - DNA, 80 bp, synthetic construct; identical to SEQ ID NO: 28416
  source 1..80: mol_type = other DNA

SEQ ID NO: 62931 - DNA, 80 bp, synthetic construct; identical to SEQ ID NO: 11008
  source 1..80: mol_type = other DNA

SEQ ID NO: 62932 - DNA, 80 bp, synthetic construct; identical to SEQ ID NO: 28418
  source 1..80: mol_type = other DNA

SEQ ID NO: 62933 - DNA, 80 bp, synthetic construct; identical to SEQ ID NO: 28419
  source 1..80: mol_type = other DNA

SEQ ID NO: 62934 - DNA, 80 bp, synthetic construct; identical to SEQ ID NO: 11009
  source 1..80: mol_type = other DNA

SEQ ID NO: 62935 - DNA, 80 bp, synthetic construct; identical to SEQ ID NO: 28421
  source 1..80: mol_type = other DNA

SEQ ID NO: 62936 - DNA, 80 bp, synthetic construct; identical to SEQ ID NO: 28422
  source 1..80: mol_type = other DNA

SEQ ID NO: 62937 - DNA, 80 bp, synthetic construct; identical to SEQ ID NO: 28423
  source 1..80: mol_type = other DNA

SEQ ID NO: 62938 - DNA, 80 bp, synthetic construct; identical to SEQ ID NO: 28424
  source 1..80: mol_type = other DNA

SEQ ID NO: 62939 - DNA, 80 bp, synthetic construct; identical to SEQ ID NO: 11010
  source 1..80: mol_type = other DNA

SEQ ID NO: 62940 - DNA, 80 bp, synthetic construct; identical to SEQ ID NO: 28426
  source 1..80: mol_type = other DNA

SEQ ID NO: 62941 - DNA, 80 bp, synthetic construct; identical to SEQ ID NO: 28427
  source 1..80: mol_type = other DNA

SEQ ID NO: 62942 - DNA, 80 bp, synthetic construct; identical to SEQ ID NO: 28428
  source 1..80: mol_type = other DNA

SEQ ID NO: 62943 - DNA, 80 bp, synthetic construct; identical to SEQ ID NO: 11011
  source 1..80: mol_type = other DNA

SEQ ID NO: 62944 - DNA, 80 bp, synthetic construct; identical to SEQ ID NO: 28430
  source 1..80: mol_type = other DNA

SEQ ID NO: 62945 - DNA, 80 bp, synthetic construct; identical to SEQ ID NO: 28431
  source 1..80: mol_type = other DNA

SEQ ID NO: 62946 - DNA, 80 bp, synthetic construct; identical to SEQ ID NO: 28432
  source 1..80: mol_type = other DNA

SEQ ID NO: 62947 - DNA, 80 bp, synthetic construct; identical to SEQ ID NO: 11012
  source 1..80: mol_type = other DNA

SEQ ID NO: 62948 - DNA, 80 bp, synthetic construct; identical to SEQ ID NO: 28434
  source 1..80: mol_type = other DNA

SEQ ID NO: 62949 - DNA, 80 bp, synthetic construct; identical to SEQ ID NO: 28435
  source 1..80: mol_type = other DNA

SEQ ID NO: 62950 - DNA, 80 bp, synthetic construct; identical to SEQ ID NO: 28436
  source 1..80: mol_type = other DNA

SEQ ID NO: 62951 - DNA, 80 bp, synthetic construct; identical to SEQ ID NO: 11013
  source 1..80: mol_type = other DNA

SEQ ID NO: 62952 - DNA, 80 bp, synthetic construct; identical to SEQ ID NO: 28438
  source 1..80: mol_type = other DNA

SEQ ID NO: 62953 - DNA, 80 bp, synthetic construct; identical to SEQ ID NO: 28439
  source 1..80: mol_type = other DNA

SEQ ID NO: 62954 - DNA, 80 bp, synthetic construct; identical to SEQ ID NO: 28440
  source 1..80: mol_type = other DNA

SEQ ID NO: 62955 - DNA, 80 bp, synthetic construct; identical to SEQ ID NO: 11014
  source 1..80: mol_type = other DNA

SEQ ID NO: 62956 - DNA, 80 bp, synthetic construct; identical to SEQ ID NO: 28442
  source 1..80: mol_type = other DNA

SEQ ID NO: 62957 - DNA, 80 bp, synthetic construct; identical to SEQ ID NO: 28443
  source 1..80: mol_type = other DNA

SEQ ID NO: 62958 - DNA, 80 bp, synthetic construct; identical to SEQ ID NO: 11015
  source 1..80: mol_type = other DNA

SEQ ID NO: 62959 - DNA, 80 bp, synthetic construct; identical to SEQ ID NO: 28445
  source 1..80: mol_type = other DNA

SEQ ID NO: 62960 - DNA, 80 bp, synthetic construct; identical to SEQ ID NO: 28446
  source 1..80: mol_type = other DNA

SEQ ID NO: 62961 - DNA, 80 bp, synthetic construct; identical to SEQ ID NO: 28447
  source 1..80: mol_type = other DNA

SEQ ID NO: 62962 - DNA, 80 bp, synthetic construct; identical to SEQ ID NO: 11016
  source 1..80: mol_type = other DNA

SEQ ID NO: 62963 - DNA, 80 bp, synthetic construct; identical to SEQ ID NO: 28449
  source 1..80: mol_type = other DNA

SEQ ID NO: 62964 - DNA, 80 bp, synthetic construct; identical to SEQ ID NO: 28450
  source 1..80: mol_type = other DNA

SEQ ID NO: 62965 - DNA, 80 bp, synthetic construct; identical to SEQ ID NO: 28451
  source 1..80: mol_type = other DNA

SEQ ID NO: 62966 - DNA, 80 bp, synthetic construct; identical to SEQ ID NO: 11017
  source 1..80: mol_type = other DNA

SEQ ID NO: 62967 - DNA, 80 bp, synthetic construct; identical to SEQ ID NO: 28453
  source 1..80: mol_type = other DNA

SEQ ID NO: 62968 - DNA, 80 bp, synthetic construct; identical to SEQ ID NO: 28454
  source 1..80: mol_type = other DNA

SEQ ID NO: 62969 - DNA, 80 bp, synthetic construct; identical to SEQ ID NO: 28455
  source 1..80: mol_type = other DNA

SEQ ID NO: 62970 - DNA, 80 bp, synthetic construct; identical to SEQ ID NO: 28456
  source 1..80: mol_type = other DNA

SEQ ID NO: 62971 - DNA, 80 bp, synthetic construct; identical to SEQ ID NO: 11018
  source 1..80: mol_type = other DNA

SEQ ID NO: 62972 - DNA, 80 bp, synthetic construct; identical to SEQ ID NO: 28458
  source 1..80: mol_type = other DNA

SEQ ID NO: 62973 - DNA, 80 bp, synthetic construct; identical to SEQ ID NO: 28459
  source 1..80: mol_type = other DNA

SEQ ID NO: 62974 - DNA, 80 bp, synthetic construct; identical to SEQ ID NO: 11019
  source 1..80: mol_type = other DNA

SEQ ID NO: 62975 - DNA, 80 bp, synthetic construct; identical to SEQ ID NO: 28461
  source 1..80: mol_type = other DNA

SEQ ID NO: 62976 - DNA, 80 bp, synthetic construct; identical to SEQ ID NO: 28462
  source 1..80: mol_type = other DNA

SEQ ID NO: 62977 - DNA, 80 bp, synthetic construct; identical to SEQ ID NO: 28463
  source 1..80: mol_type = other DNA

SEQ ID NO: 62978 - DNA, 80 bp, synthetic construct; identical to SEQ ID NO: 28464
  source 1..80: mol_type = other DNA

SEQ ID NO: 62979 - DNA, 80 bp, synthetic construct; identical to SEQ ID NO: 11020
  source 1..80: mol_type = other DNA

SEQ ID NO: 62980 - DNA, 80 bp, synthetic construct; identical to SEQ ID NO: 28466
  source 1..80: mol_type = other DNA

SEQ ID NO: 62981 - DNA, 80 bp, synthetic construct; identical to SEQ ID NO: 28467
  source 1..80: mol_type = other DNA

SEQ ID NO: 62982 - DNA, 80 bp, synthetic construct; identical to SEQ ID NO: 28468
  source 1..80: mol_type = other DNA

SEQ ID NO: 62983 - DNA, 80 bp, synthetic construct; identical to SEQ ID NO: 11021
  source 1..80: mol_type = other DNA

SEQ ID NO: 62984 - DNA, 80 bp, synthetic construct; identical to SEQ ID NO: 28470
  source 1..80: mol_type = other DNA

SEQ ID NO: 62985 - DNA, 80 bp, synthetic construct; identical to SEQ ID NO: 28471
  source 1..80: mol_type = other DNA

SEQ ID NO: 62986 - DNA, 80 bp, synthetic construct; identical to SEQ ID NO: 28472
  source 1..80: mol_type = other DNA

SEQ ID NO: 62987 - DNA, 80 bp, synthetic construct; identical to SEQ ID NO: 11022
  source 1..80: mol_type = other DNA

SEQ ID NO: 62988 - DNA, 80 bp, synthetic construct; identical to SEQ ID NO: 28474
  source 1..80: mol_type = other DNA

SEQ ID NO: 62989 - DNA, 80 bp, synthetic construct; identical to SEQ ID NO: 28475
  source 1..80: mol_type = other DNA

SEQ ID NO: 62990 - DNA, 80 bp, synthetic construct; identical to SEQ ID NO: 11023
  source 1..80: mol_type = other DNA

SEQ ID NO: 62991 - DNA, 80 bp, synthetic construct; identical to SEQ ID NO: 28477
  source 1..80: mol_type = other DNA

SEQ ID NO: 62992 - DNA, 80 bp, synthetic construct; identical to SEQ ID NO: 28478
  source 1..80: mol_type = other DNA

SEQ ID NO: 62993 - DNA, 80 bp, synthetic construct; identical to SEQ ID NO: 28479
  source 1..80: mol_type = other DNA

SEQ ID NO: 62994 - DNA, 80 bp, synthetic construct; identical to SEQ ID NO: 11024
  source 1..80: mol_type = other DNA

SEQ ID NO: 62995 - DNA, 80 bp, synthetic construct; identical to SEQ ID NO: 28481
  source 1..80: mol_type = other DNA

SEQ ID NO: 62996 - DNA, 80 bp, synthetic construct; identical to SEQ ID NO: 28482
  source 1..80: mol_type = other DNA

SEQ ID NO: 62997 - DNA, 80 bp, synthetic construct; identical to SEQ ID NO: 28483
  source 1..80: mol_type = other DNA

SEQ ID NO: 62998 - DNA, 80 bp, synthetic construct; identical to SEQ ID NO: 28484
  source 1..80: mol_type = other DNA

SEQ ID NO: 62999 - DNA, 80 bp, synthetic construct; identical to SEQ ID NO: 11025
  source 1..80: mol_type = other DNA

SEQ ID NO: 63000 - DNA, 80 bp, synthetic construct; identical to SEQ ID NO: 28486
  source 1..80: mol_type = other DNA

SEQ ID NO: 63001 - DNA, 80 bp, synthetic construct; identical to SEQ ID NO: 28487
  source 1..80: mol_type = other DNA

SEQ ID NO: 63002 - DNA, 80 bp, synthetic construct; identical to SEQ ID NO: 11026
  source 1..80: mol_type = other DNA

SEQ ID NO: 63003 - DNA, 80 bp, synthetic construct; identical to SEQ ID NO: 28489
  source 1..80: mol_type = other DNA

SEQ ID NO: 63004 - DNA, 80 bp, synthetic construct; identical to SEQ ID NO: 28490
  source 1..80: mol_type = other DNA

SEQ ID NO: 63005 - DNA, 80 bp, synthetic construct; identical to SEQ ID NO: 28491
  source 1..80: mol_type = other DNA

SEQ ID NO: 63006 - DNA, 80 bp, synthetic construct; identical to SEQ ID NO: 11027
  source 1..80: mol_type = other DNA

SEQ ID NO: 63007 - DNA, 80 bp, synthetic construct; identical to SEQ ID NO: 28494
  source 1..80: mol_type = other DNA

SEQ ID NO: 63008 - DNA, 80 bp, synthetic construct; identical to SEQ ID NO: 28495
  source 1..80: mol_type = other DNA

SEQ ID NO: 63009 - DNA, 80 bp, synthetic construct; identical to SEQ ID NO: 11028
  source 1..80: mol_type = other DNA

SEQ ID NO: 63010 - DNA, 80 bp, synthetic construct; identical to SEQ ID NO: 28497
  source 1..80: mol_type = other DNA

SEQ ID NO: 63011 - DNA, 80 bp, synthetic construct; identical to SEQ ID NO: 28498
  source 1..80: mol_type = other DNA

SEQ ID NO: 63012 - DNA, 80 bp, synthetic construct; identical to SEQ ID NO: 28499
  source 1..80: mol_type = other DNA

SEQ ID NO: 63013 - DNA, 80 bp, synthetic construct; identical to SEQ ID NO: 28500
  source 1..80: mol_type = other DNA

SEQ ID NO: 63014 - DNA, 80 bp, synthetic construct; identical to SEQ ID NO: 11029
  source 1..80: mol_type = other DNA

SEQ ID NO: 63015 - DNA, 80 bp, synthetic construct; identical to SEQ ID NO: 28502
  source 1..80: mol_type = other DNA

SEQ ID NO: 63016 - DNA, 80 bp, synthetic construct; identical to SEQ ID NO: 28503
  source 1..80: mol_type = other DNA

SEQ ID NO: 63017 - DNA, 80 bp, synthetic construct; identical to SEQ ID NO: 11030
  source 1..80: mol_type = other DNA

SEQ ID NO: 63018 - DNA, 80 bp, synthetic construct; identical to SEQ ID NO: 28505
  source 1..80: mol_type = other DNA

SEQ ID NO: 63019 - DNA, 80 bp, synthetic construct; identical to SEQ ID NO: 28506
  source 1..80: mol_type = other DNA

SEQ ID NO: 63020 - DNA, 80 bp, synthetic construct; identical to SEQ ID NO: 28507
  source 1..80: mol_type = other DNA

SEQ ID NO: 63021 - DNA, 80 bp, synthetic construct; identical to SEQ ID NO: 28509
  source 1..80: mol_type = other DNA

SEQ ID NO: 63022 - DNA, 80 bp, synthetic construct; identical to SEQ ID NO: 28510
  source 1..80: mol_type = other DNA

SEQ ID NO: 63023 - DNA, 80 bp, synthetic construct; identical to SEQ ID NO: 11032
  source 1..80: mol_type = other DNA

SEQ ID NO: 63024 - DNA, 80 bp, synthetic construct; identical to SEQ ID NO: 28513
  source 1..80: mol_type = other DNA

SEQ ID NO: 63025 - DNA, 80 bp, synthetic construct; identical to SEQ ID NO: 28514
  source 1..80: mol_type = other DNA

SEQ ID NO: 63026 - DNA, 80 bp, synthetic construct; identical to SEQ ID NO: 28515
  source 1..80: mol_type = other DNA

SEQ ID NO: 63027 - DNA, 80 bp, synthetic construct; identical to SEQ ID NO: 28516
  source 1..80: mol_type = other DNA

SEQ ID NO: 63028 - DNA, 80 bp, synthetic construct; identical to SEQ ID NO: 11033
  source 1..80: mol_type = other DNA

SEQ ID NO: 63029 - DNA, 80 bp, synthetic construct; identical to SEQ ID NO: 28519
  source 1..80: mol_type = other DNA

SEQ ID NO: 63030 - DNA, 80 bp, synthetic construct; identical to SEQ ID NO: 28520
  source 1..80: mol_type = other DNA

SEQ ID NO: 63031 - DNA, 80 bp, synthetic construct; identical to SEQ ID NO: 11034
  source 1..80: mol_type = other DNA

SEQ ID NO: 63032 - DNA, 80 bp, synthetic construct; identical to SEQ ID NO: 28522
  source 1..80: mol_type = other DNA

SEQ ID NO: 63033 - DNA, 80 bp, synthetic construct; identical to SEQ ID NO: 28523
  source 1..80: mol_type = other DNA

SEQ ID NO: 63034 - DNA, 80 bp, synthetic construct; identical to SEQ ID NO: 28524
  source 1..80: mol_type = other DNA

SEQ ID NO: 63035 - DNA, 80 bp, synthetic construct; identical to SEQ ID NO: 28525
  source 1..80: mol_type = other DNA

SEQ ID NO: 63036 - DNA, 80 bp, synthetic construct; identical to SEQ ID NO: 11035
  source 1..80: mol_type = other DNA

SEQ ID NO: 63037 - DNA, 80 bp, synthetic construct; identical to SEQ ID NO: 28527
  source 1..80: mol_type = other DNA

SEQ ID NO: 63038 - DNA, 80 bp, synthetic construct; identical to SEQ ID NO: 28528
  source 1..80: mol_type = other DNA

SEQ ID NO: 63039 - DNA, 80 bp, synthetic construct; identical to SEQ ID NO: 11036
  source 1..80: mol_type = other DNA

SEQ ID NO: 63040 - DNA, 80 bp, synthetic construct; identical to SEQ ID NO: 28531
  source 1..80: mol_type = other DNA

SEQ ID NO: 63041 - DNA, 80 bp, synthetic construct; identical to SEQ ID NO: 28532
  source 1..80: mol_type = other DNA

SEQ ID NO: 63042 - DNA, 80 bp, synthetic construct; identical to SEQ ID NO: 11037
  source 1..80: mol_type = other DNA

SEQ ID NO: 63043 - DNA, 80 bp, synthetic construct; identical to SEQ ID NO: 28534
  source 1..80: mol_type = other DNA

SEQ ID NO: 63044 - DNA, 80 bp, synthetic construct; identical to SEQ ID NO: 28535
  source 1..80: mol_type = other DNA

SEQ ID NO: 63045 - DNA, 80 bp, synthetic construct; identical to SEQ ID NO: 28536
  source 1..80: mol_type = other DNA

SEQ ID NO: 63046 - DNA, 80 bp, synthetic construct; identical to SEQ ID NO: 28537
  source 1..80: mol_type = other DNA

SEQ ID NO: 63047 - DNA, 80 bp, synthetic construct; identical to SEQ ID NO: 11038
  source 1..80: mol_type = other DNA

SEQ ID NO: 63048 - DNA, 80 bp, synthetic construct; identical to SEQ ID NO: 28539
  source 1..80: mol_type = other DNA

SEQ ID NO: 63049 - DNA, 80 bp, synthetic construct; identical to SEQ ID NO: 28540
  source 1..80: mol_type = other DNA

SEQ ID NO: 63050 - DNA, 80 bp, synthetic construct; identical to SEQ ID NO: 28541
  source 1..80: mol_type = other DNA

SEQ ID NO: 63051 - DNA, 80 bp, synthetic construct; identical to SEQ ID NO: 11039
  source 1..80: mol_type = other DNA

SEQ ID NO: 63052 - DNA, 80 bp, synthetic construct; identical to SEQ ID NO: 28544
  source 1..80: mol_type = other DNA

SEQ ID NO: 63053 - DNA, 80 bp, synthetic construct; identical to SEQ ID NO: 28545
  source 1..80: mol_type = other DNA

SEQ ID NO: 63054 - DNA, 80 bp, synthetic construct; identical to SEQ ID NO: 11040
  source 1..80: mol_type = other DNA

SEQ ID NO: 63055 - DNA, 80 bp, synthetic construct; identical to SEQ ID NO: 28547
  source 1..80: mol_type = other DNA

SEQ ID NO: 63056 - DNA, 80 bp, synthetic construct; identical to SEQ ID NO: 28548
  source 1..80: mol_type = other DNA

SEQ ID NO: 63057 - DNA, 80 bp, synthetic construct; identical to SEQ ID NO: 28549
  source 1..80: mol_type = other DNA

SEQ ID NO: 63058 - DNA, 80 bp, synthetic construct; identical to SEQ ID NO: 11041
  source 1..80: mol_type = other DNA

SEQ ID NO: 63059 - DNA, 80 bp, synthetic construct; identical to SEQ ID NO: 28551
  source 1..80: mol_type = other DNA

SEQ ID NO: 63060 - DNA, 80 bp, synthetic construct; identical to SEQ ID NO: 28552
  source 1..80: mol_type = other DNA

SEQ ID NO: 63061 - DNA, 80 bp, synthetic construct; identical to SEQ ID NO: 11042
  source 1..80: mol_type = other DNA

SEQ ID NO: 63062 - DNA, 80 bp, synthetic construct; identical to SEQ ID NO: 28554
  source 1..80: mol_type = other DNA

SEQ ID NO: 63063 - DNA, 80 bp, synthetic construct; identical to SEQ ID NO: 28555
  source 1..80: mol_type = other DNA

SEQ ID NO: 63064 - DNA, 80 bp, synthetic construct; identical to SEQ ID NO: 28556
  source 1..80: mol_type = other DNA

SEQ ID NO: 63065 - DNA, 80 bp, synthetic construct; identical to SEQ ID NO: 28557
  source 1..80: mol_type = other DNA

SEQ ID NO: 63066 - DNA, 80 bp, synthetic construct; identical to SEQ ID NO: 11043
  source 1..80: mol_type = other DNA

SEQ ID NO: 63067 - DNA, 80 bp, synthetic construct; identical to SEQ ID NO: 28559
  source 1..80: mol_type = other DNA

SEQ ID NO: 63068 - DNA, 80 bp, synthetic construct; identical to SEQ ID NO: 28560
  source 1..80: mol_type = other DNA

SEQ ID NO: 63069 - DNA, 80 bp, synthetic construct; identical to SEQ ID NO: 11044
  source 1..80: mol_type = other DNA

SEQ ID NO: 63070 - DNA, 80 bp, synthetic construct; identical to SEQ ID NO: 28562
  source 1..80: mol_type = other DNA

SEQ ID NO: 63071 - DNA, 80 bp, synthetic construct; identical to SEQ ID NO: 28563
  source 1..80: mol_type = other DNA

SEQ ID NO: 63072 - DNA, 80 bp, synthetic construct; identical to SEQ ID NO: 28564
  source 1..80: mol_type = other DNA

SEQ ID NO: 63073 - DNA, 80 bp, synthetic construct; identical to SEQ ID NO: 11045
  source 1..80: mol_type = other DNA

SEQ ID NO: 63074 - DNA, 80 bp, synthetic construct; identical to SEQ ID NO: 28567
  source 1..80: mol_type = other DNA

SEQ ID NO: 63075 - DNA, 80 bp, synthetic construct; identical to SEQ ID NO: 28568
  source 1..80: mol_type = other DNA

SEQ ID NO: 63076 - DNA, 80 bp, synthetic construct; identical to SEQ ID NO: 28569
  source 1..80: mol_type = other DNA

SEQ ID NO: 63077 - DNA, 80 bp, synthetic construct; identical to SEQ ID NO: 11046
  source 1..80: mol_type = other DNA

SEQ ID NO: 63078 - DNA, 80 bp, synthetic construct; identical to SEQ ID NO: 28571
  source 1..80: mol_type = other DNA

SEQ ID NO: 63079 - DNA, 80 bp, synthetic construct; identical to SEQ ID NO: 28572
  source 1..80: mol_type = other DNA

SEQ ID NO: 63080 - DNA, 80 bp, synthetic construct; identical to SEQ ID NO: 11047
  source 1..80: mol_type = other DNA

SEQ ID NO: 63081 - DNA, 80 bp, synthetic construct; identical to SEQ ID NO: 28575
  source 1..80: mol_type = other DNA

SEQ ID NO: 63082 - DNA, 80 bp, synthetic construct; identical to SEQ ID NO: 28576
  source 1..80: mol_type = other DNA

SEQ ID NO: 63083 - DNA, 80 bp, synthetic construct; identical to SEQ ID NO: 11048
  source 1..80: mol_type = other DNA

SEQ ID NO: 63084 - DNA, 80 bp, synthetic construct; identical to SEQ ID NO: 28578
  source 1..80: mol_type = other DNA

SEQ ID NO: 63085 - DNA, 80 bp, synthetic construct; identical to SEQ ID NO: 28579
  source 1..80: mol_type = other DNA

SEQ ID NO: 63086 - DNA, 80 bp, synthetic construct; identical to SEQ ID NO: 28580
  source 1..80: mol_type = other DNA

SEQ ID NO: 63087 - DNA, 80 bp, synthetic construct; identical to SEQ ID NO: 11049
  source 1..80: mol_type = other DNA

SEQ ID NO: 63088 - DNA, 80 bp, synthetic construct; identical to SEQ ID NO: 28582
  source 1..80: mol_type = other DNA

SEQ ID NO: 63089 - DNA, 80 bp, synthetic construct; identical to SEQ ID NO: 28583
  source 1..80: mol_type = other DNA

SEQ ID NO: 63090 - DNA, 80 bp, synthetic construct; identical to SEQ ID NO: 11050
  source 1..80: mol_type = other DNA

SEQ ID NO: 63091 - DNA, 80 bp, synthetic construct; identical to SEQ ID NO: 28586
  source 1..80: mol_type = other DNA

SEQ ID NO: 63092 - DNA, 80 bp, synthetic construct; identical to SEQ ID NO: 28587
  source 1..80: mol_type = other DNA

SEQ ID NO: 63093 - DNA, 80 bp, synthetic construct; identical to SEQ ID NO: 28588
  source 1..80: mol_type = other DNA

SEQ ID NO: 63094 - DNA, 80 bp, synthetic construct; identical to SEQ ID NO: 11051
  source 1..80: mol_type = other DNA

SEQ ID NO: 63095 - DNA, 80 bp, synthetic construct; identical to SEQ ID NO: 28590
  source 1..80: mol_type = other DNA

SEQ ID NO: 63096 - DNA, 80 bp, synthetic construct; identical to SEQ ID NO: 28591
  source 1..80: mol_type = other DNA

SEQ ID NO: 63097 - DNA, 80 bp, synthetic construct; identical to SEQ ID NO: 28592
  source 1..80: mol_type = other DNA

SEQ ID NO: 63098 - DNA, 80 bp, synthetic construct; identical to SEQ ID NO: 28593
  source 1..80: mol_type = other DNA

SEQ ID NO: 63099 - DNA, 80 bp, synthetic construct; identical to SEQ ID NO: 11052
  source 1..80: mol_type = other DNA

SEQ ID NO: 63100 - DNA, 80 bp, synthetic construct; identical to SEQ ID NO: 28595
  source 1..80: mol_type = other DNA

SEQ ID NO: 63101 - DNA, 80 bp, synthetic construct; identical to SEQ ID NO: 28596
  source 1..80: mol_type = other DNA

SEQ ID NO: 63102 - DNA, 80 bp, synthetic construct; identical to SEQ ID NO: 28597
  source 1..80: mol_type = other DNA

SEQ ID NO: 63103 - DNA, 80 bp, synthetic construct; identical to SEQ ID NO: 11053
  source 1..80: mol_type = other DNA

SEQ ID NO: 63104 - DNA, 80 bp, synthetic construct; identical to SEQ ID NO: 28599
  source 1..80: mol_type = other DNA

SEQ ID NO: 63105 - DNA, 80 bp, synthetic construct; identical to SEQ ID NO: 28600
  source 1..80: mol_type = other DNA

SEQ ID NO: 63106 - DNA, 80 bp, synthetic construct; identical to SEQ ID NO: 11054
  source 1..80: mol_type = other DNA

SEQ ID NO: 63107 - DNA, 80 bp, synthetic construct; identical to SEQ ID NO: 28602
  source 1..80: mol_type = other DNA

SEQ ID NO: 63108 - DNA, 80 bp, synthetic construct; identical to SEQ ID NO: 28603
  source 1..80: mol_type = other DNA

SEQ ID NO: 63109 - DNA, 80 bp, synthetic construct; identical to SEQ ID NO: 28604
  source 1..80: mol_type = other DNA

SEQ ID NO: 63110 - DNA, 80 bp, synthetic construct; identical to SEQ ID NO: 28605
  source 1..80: mol_type = other DNA

SEQ ID NO: 63111 - DNA, 80 bp, synthetic construct; identical to SEQ ID NO: 11055
  source 1..80: mol_type = other DNA

SEQ ID NO: 63112 - DNA, 80 bp, synthetic construct; identical to SEQ ID NO: 28607
  source 1..80: mol_type = other DNA

SEQ ID NO: 63113 - DNA, 80 bp, synthetic construct; identical to SEQ ID NO: 28608
  source 1..80: mol_type = other DNA

SEQ ID NO: 63114 - DNA, 80 bp, synthetic construct; identical to SEQ ID NO: 11056
  source 1..80: mol_type = other DNA

SEQ ID NO: 63115 - DNA, 80 bp, synthetic construct; identical to SEQ ID NO: 28610
  source 1..80: mol_type = other DNA

SEQ ID NO: 63116 - DNA, 80 bp, synthetic construct; identical to SEQ ID NO: 28611
  source 1..80: mol_type = other DNA

SEQ ID NO: 63117 - DNA, 80 bp, synthetic construct; identical to SEQ ID NO: 28612
  source 1..80: mol_type = other DNA

SEQ ID NO: 63118 - DNA, 80 bp, synthetic construct; identical to SEQ ID NO: 28613
  source 1..80: mol_type = other DNA

SEQ ID NO: 63119 - DNA, 80 bp, synthetic construct; identical to SEQ ID NO: 11057
  source 1..80: mol_type = other DNA

SEQ ID NO: 63120 - DNA, 80 bp, synthetic construct; identical to SEQ ID NO: 28615
  source 1..80: mol_type = other DNA

SEQ ID NO: 63121 - DNA, 80 bp, synthetic construct; identical to SEQ ID NO: 28616
  source 1..80: mol_type = other DNA

SEQ ID NO: 63122 - DNA, 80 bp, synthetic construct; identical to SEQ ID NO: 11058
  source 1..80: mol_type = other DNA

SEQ ID NO: 63123 - DNA, 80 bp, synthetic construct; identical to SEQ ID NO: 28618
  source 1..80: mol_type = other DNA

SEQ ID NO: 63124 - DNA, 80 bp, synthetic construct; identical to SEQ ID NO: 28619
  source 1..80: mol_type = other DNA

SEQ ID NO: 63125 - DNA, 80 bp, synthetic construct; identical to SEQ ID NO: 28620
  source 1..80: mol_type = other DNA

SEQ ID NO: 63126 - DNA, 80 bp, synthetic construct; identical to SEQ ID NO: 11059
  source 1..80: mol_type = other DNA

SEQ ID NO: 63127 - DNA, 80 bp, synthetic construct; identical to SEQ ID NO: 28622
  source 1..80: mol_type = other DNA

SEQ ID NO: 63128 - DNA, 80 bp, synthetic construct; identical to SEQ ID NO: 28623
  source 1..80: mol_type = other DNA

SEQ ID NO: 63129 - DNA, 80 bp, synthetic construct; identical to SEQ ID NO: 28624
  source 1..80: mol_type = other DNA

SEQ ID NO: 63130 - DNA, 80 bp, synthetic construct; identical to SEQ ID NO: 28625
  source 1..80: mol_type = other DNA

SEQ ID NO: 63131 - DNA, 80 bp, synthetic construct; identical to SEQ ID NO: 11060
  source 1..80: mol_type = other DNA

SEQ ID NO: 63132 - DNA, 80 bp, synthetic construct; identical to SEQ ID NO: 28627
  source 1..80: mol_type = other DNA

SEQ ID NO: 63133 - DNA, 80 bp, synthetic construct; identical to SEQ ID NO: 28628
  source 1..80: mol_type = other DNA

SEQ ID NO: 63134 - DNA, 80 bp, synthetic construct; identical to SEQ ID NO: 11061
  source 1..80: mol_type = other DNA

SEQ ID NO: 63135 - DNA, 80 bp, synthetic construct; identical to SEQ ID NO: 28630
  source 1..80: mol_type = other DNA

SEQ ID NO: 63136 - DNA, 80 bp, synthetic construct; identical to SEQ ID NO: 28631
  source 1..80: mol_type = other DNA

SEQ ID NO: 63137 - DNA, 80 bp, synthetic construct; identical to SEQ ID NO: 28632
  source 1..80: mol_type = other DNA

SEQ ID NO: 63138 - DNA, 80 bp, synthetic construct; identical to SEQ ID NO: 11062
  source 1..80: mol_type = other DNA

SEQ ID NO: 63139 - DNA, 80 bp, synthetic construct; identical to SEQ ID NO: 28634
  source 1..80: mol_type = other DNA

SEQ ID NO: 63140 - DNA, 80 bp, synthetic construct; identical to SEQ ID NO: 28635
  source 1..80: mol_type = other DNA

SEQ ID NO: 63141 - DNA, 80 bp, synthetic construct; identical to SEQ ID NO: 28636
  source 1..80: mol_type = other DNA

SEQ ID NO: 63142 - DNA, 80 bp, synthetic construct; identical to SEQ ID NO: 28637
  source 1..80: mol_type = other DNA

SEQ ID NO: 63143 - DNA, 80 bp, synthetic construct; identical to SEQ ID NO: 11063
  source 1..80: mol_type = other DNA

SEQ ID NO: 63144 - DNA, 80 bp, synthetic construct; identical to SEQ ID NO: 28639
  source 1..80: mol_type = other DNA

SEQ ID NO: 63145 - DNA, 80 bp, synthetic construct; identical to SEQ ID NO: 28640
  source 1..80: mol_type = other DNA

SEQ ID NO: 63146 - DNA, 80 bp, synthetic construct; identical to SEQ ID NO: 28641
  source 1..80: mol_type = other DNA

SEQ ID NO: 63147 - DNA, 80 bp, synthetic construct; identical to SEQ ID NO: 11064
  source 1..80: mol_type = other DNA

SEQ ID NO: 63148 - DNA, 80 bp, synthetic construct; identical to SEQ ID NO: 28643
  source 1..80: mol_type = other DNA

SEQ ID NO: 63149 - DNA, 80 bp, synthetic construct; identical to SEQ ID NO: 28644
  source 1..80: mol_type = other DNA

SEQ ID NO: 63150 - DNA, 80 bp, synthetic construct; identical to SEQ ID NO: 28645
  source 1..80: mol_type = other DNA

SEQ ID NO: 63151 - DNA, 80 bp, synthetic construct; identical to SEQ ID NO: 11065
  source 1..80: mol_type = other DNA

SEQ ID NO: 63152 - DNA, 80 bp, synthetic construct; identical to SEQ ID NO: 28647
  source 1..80: mol_type = other DNA

SEQ ID NO: 63153 - DNA, 80 bp, synthetic construct; identical to SEQ ID NO: 28648
  source 1..80: mol_type = other DNA

SEQ ID NO: 63154 - DNA, 80 bp, synthetic construct; identical to SEQ ID NO: 28649
  source 1..80: mol_type = other DNA

SEQ ID NO: 63155 - DNA, 80 bp, synthetic construct; identical to SEQ ID NO: 11066
  source 1..80: mol_type = other DNA

SEQ ID NO: 63156 - DNA, 80 bp, synthetic construct; identical to SEQ ID NO: 28651
  source 1..80: mol_type = other DNA

SEQ ID NO: 63157 - DNA, 80 bp, synthetic construct; identical to SEQ ID NO: 28652
  source 1..80: mol_type = other DNA

SEQ ID NO: 63158 - DNA, 80 bp, synthetic construct; identical to SEQ ID NO: 11067
  source 1..80: mol_type = other DNA

SEQ ID NO: 63159 - DNA, 80 bp, synthetic construct; identical to SEQ ID NO: 28654
  source 1..80: mol_type = other DNA

SEQ ID NO: 63160 - DNA, 80 bp, synthetic construct; identical to SEQ ID NO: 28655
  source 1..80: mol_type = other DNA

SEQ ID NO: 63161 - DNA, 80 bp, synthetic construct; identical to SEQ ID NO: 28656
  source 1..80: mol_type = other DNA

SEQ ID NO: 63162 - DNA, 80 bp, synthetic construct; identical to SEQ ID NO: 11068
  source 1..80: mol_type = other DNA

SEQ ID NO: 63163 - DNA, 80 bp, synthetic construct; identical to SEQ ID NO: 28658
  source 1..80: mol_type = other DNA

SEQ ID NO: 63164 - DNA, 80 bp, synthetic construct; identical to SEQ ID NO: 28659
  source 1..80: mol_type = other DNA

SEQ ID NO: 63165 - DNA, 80 bp, synthetic construct; identical to SEQ ID NO: 28660
  source 1..80: mol_type = other DNA

SEQ ID NO: 63166 - DNA, 80 bp, synthetic construct; identical to SEQ ID NO: 28661
  source 1..80: mol_type = other DNA

SEQ ID NO: 63167 - DNA, 80 bp, synthetic construct; identical to SEQ ID NO: 11069
  source 1..80: mol_type = other DNA

SEQ ID NO: 63168 - DNA, 80 bp, synthetic construct; identical to SEQ ID NO: 28663
  source 1..80: mol_type = other DNA

SEQ ID NO: 63169 - DNA, 80 bp, synthetic construct; identical to SEQ ID NO: 28664
  source 1..80: mol_type = other DNA

SEQ ID NO: 63170 - DNA, 80 bp, synthetic construct; identical to SEQ ID NO: 11070
  source 1..80: mol_type = other DNA

SEQ ID NO: 63171 - DNA, 80 bp, synthetic construct; identical to SEQ ID NO: 28666
  source 1..80: mol_type = other DNA

SEQ ID NO: 63172 - DNA, 80 bp, synthetic construct; identical to SEQ ID NO: 28667
  source 1..80: mol_type = other DNA

SEQ ID NO: 63173 - DNA, 80 bp, synthetic construct; identical to SEQ ID NO: 28668
  source 1..80: mol_type = other DNA

SEQ ID NO: 63174 - DNA, 80 bp, synthetic construct; identical to SEQ ID NO: 11071
  source 1..80: mol_type = other DNA

SEQ ID NO: 63175 - DNA, 80 bp, synthetic construct; identical to SEQ ID NO: 28670
  source 1..80: mol_type = other DNA

SEQ ID NO: 63176 - DNA, 80 bp, synthetic construct; identical to SEQ ID NO: 28671
  source 1..80: mol_type = other DNA

SEQ ID NO: 63177 - DNA, 80 bp, synthetic construct; identical to SEQ ID NO: 28672
  source 1..80: mol_type = other DNA

SEQ ID NO: 63178 - DNA, 80 bp, synthetic construct; identical to SEQ ID NO: 28673
  source 1..80: mol_type = other DNA

SEQ ID NO: 63179 - DNA, 80 bp, synthetic construct; identical to SEQ ID NO: 11072
  source 1..80: mol_type = other DNA

SEQ ID NO: 63180 - DNA, 80 bp, synthetic construct; identical to SEQ ID NO: 28675
  source 1..80: mol_type = other DNA

SEQ ID NO: 63181 - DNA, 80 bp, synthetic construct; identical to SEQ ID NO: 28676
  source 1..80: mol_type = other DNA

SEQ ID NO: 63182 - DNA, 80 bp, synthetic construct; identical to SEQ ID NO: 11073
  source 1..80: mol_type = other DNA

SEQ ID NO: 63183 - DNA, 80 bp, synthetic construct; identical to SEQ ID NO: 28678
  source 1..80: mol_type = other DNA

SEQ ID NO: 63184 - DNA, 80 bp, synthetic construct; identical to SEQ ID NO: 28679
  source 1..80: mol_type = other DNA

SEQ ID NO: 63185 - DNA, 80 bp, synthetic construct; identical to SEQ ID NO: 28680
  source 1..80: mol_type = other DNA

SEQ ID NO: 63186 - DNA, 80 bp, synthetic construct; identical to SEQ ID NO: 28681
  source 1..80: mol_type = other DNA

SEQ ID NO: 63187 - DNA, 80 bp, synthetic construct; identical to SEQ ID NO: 11074
  source 1..80: mol_type = other DNA

SEQ ID NO: 63188 - DNA, 80 bp, synthetic construct; identical to SEQ ID NO: 28683
  source 1..80: mol_type = other DNA

SEQ ID NO: 63189 - DNA, 80 bp, synthetic construct; identical to SEQ ID NO: 28684
  source 1..80: mol_type = other DNA

SEQ ID NO: 63190 - DNA, 80 bp, synthetic construct; identical to SEQ ID NO: 28685
  source 1..80: mol_type = other DNA

SEQ ID NO: 63191 - DNA, 80 bp, synthetic construct; identical to SEQ ID NO: 11075
  source 1..80: mol_type = other DNA

SEQ ID NO: 63192 - DNA, 80 bp, synthetic construct; identical to SEQ ID NO: 28687
  source 1..80: mol_type = other DNA

SEQ ID NO: 63193 - DNA, 80 bp, synthetic construct; identical to SEQ ID NO: 28688
  source 1..80: mol_type = other DNA

SEQ ID NO: 63194 - DNA, 80 bp, synthetic construct; identical to SEQ ID NO: 11076
  source 1..80: mol_type = other DNA

SEQ ID NO: 63195 - DNA, 80 bp, synthetic construct; identical to SEQ ID NO: 28692
  source 1..80: mol_type = other DNA

SEQ ID NO: 63196 - DNA, 80 bp, synthetic construct; identical to SEQ ID NO: 28693
  source 1..80: mol_type = other DNA

SEQ ID NO: 63197 - DNA, 80 bp, synthetic construct; identical to SEQ ID NO: 11077
  source 1..80: mol_type = other DNA

SEQ ID NO: 63198 - DNA, 80 bp, synthetic construct; identical to SEQ ID NO: 28695
  source 1..80: mol_type = other DNA

SEQ ID NO: 63199 - DNA, 80 bp, synthetic construct; identical to SEQ ID NO: 28696
  source 1..80: mol_type = other DNA

SEQ ID NO: 63200 - DNA, 80 bp, synthetic construct; identical to SEQ ID NO: 28697
  source 1..80: mol_type = other DNA

SEQ ID NO: 63201 - DNA, 80 bp, synthetic construct; identical to SEQ ID NO: 11078
  source 1..80: mol_type = other DNA

SEQ ID NO: 63202 - DNA, 80 bp, synthetic construct; identical to SEQ ID NO: 28699
  source 1..80: mol_type = other DNA

SEQ ID NO: 63203 - DNA, 80 bp, synthetic construct; identical to SEQ ID NO: 28700
  source 1..80: mol_type = other DNA

SEQ ID NO: 63204 - DNA, 80 bp, synthetic construct; identical to SEQ ID NO: 28701
  source 1..80: mol_type = other DNA

SEQ ID NO: 63205 - DNA, 80 bp, synthetic construct; identical to SEQ ID NO: 28702
  source 1..80: mol_type = other DNA

SEQ ID NO: 63206 - DNA, 80 bp, synthetic construct; identical to SEQ ID NO: 11079
  source 1..80: mol_type = other DNA

SEQ ID NO: 63207 - DNA, 80 bp, synthetic construct; identical to SEQ ID NO: 28704
  source 1..80: mol_type = other DNA

SEQ ID NO: 63208 - DNA, 80 bp, synthetic construct; identical to SEQ ID NO: 28705
  source 1..80: mol_type = other DNA

SEQ ID NO: 63209 - DNA, 80 bp, synthetic construct; identical to SEQ ID NO: 28706
  source 1..80: mol_type = other DNA

SEQ ID NO: 63210 - DNA, 80 bp, synthetic construct; identical to SEQ ID NO: 11080
  source 1..80: mol_type = other DNA

SEQ ID NO: 63211 - DNA, 80 bp, synthetic construct; identical to SEQ ID NO: 28708
  source 1..80: mol_type = other DNA

SEQ ID NO: 63212 - DNA, 80 bp, synthetic construct; identical to SEQ ID NO: 28709
  source 1..80: mol_type = other DNA

SEQ ID NO: 63213 - DNA, 80 bp, synthetic construct; identical to SEQ ID NO: 28710
  source 1..80: mol_type = other DNA

SEQ ID NO: 63214 - DNA, 80 bp, synthetic construct; identical to SEQ ID NO: 11081
  source 1..80: mol_type = other DNA

SEQ ID NO: 63215 - DNA, 80 bp, synthetic construct; identical to SEQ ID NO: 28712
  source 1..80: mol_type = other DNA

SEQ ID NO: 63216 - DNA, 80 bp, synthetic construct; identical to SEQ ID NO: 28713
  source 1..80: mol_type = other DNA

SEQ ID NO: 63217 - DNA, 80 bp, synthetic construct; identical to SEQ ID NO: 28714
  source 1..80: mol_type = other DNA

SEQ ID NO: 63218 - DNA, 80 bp, synthetic construct; identical to SEQ ID NO: 11082
  source 1..80: mol_type = other DNA

SEQ ID NO: 63219 - DNA, 80 bp, synthetic construct; identical to SEQ ID NO: 28716
  source 1..80: mol_type = other DNA

SEQ ID NO: 63220 - DNA, 80 bp, synthetic construct; identical to SEQ ID NO: 28717
  source 1..80: mol_type = other DNA

SEQ ID NO: 63221 - DNA, 80 bp, synthetic construct; identical to SEQ ID NO: 11083
  source 1..80: mol_type = other DNA

SEQ ID NO: 63222 - DNA, 80 bp, synthetic construct; identical to SEQ ID NO: 28719
  source 1..80: mol_type = other DNA

SEQ ID NO: 63223 - DNA, 80 bp, synthetic construct; identical to SEQ ID NO: 28720
  source 1..80: mol_type = other DNA

SEQ ID NO: 63224 - DNA, 80 bp, synthetic construct; identical to SEQ ID NO: 28721
  source 1..80: mol_type = other DNA

SEQ ID NO: 63225 - DNA, 80 bp, synthetic construct; identical to SEQ ID NO: 11084
  source 1..80: mol_type = other DNA

SEQ ID NO: 63226 - DNA, 80 bp, synthetic construct; identical to SEQ ID NO: 28723
  source 1..80: mol_type = other DNA

SEQ ID NO: 63227 - DNA, 80 bp, synthetic construct; identical to SEQ ID NO: 28724
  source 1..80: mol_type = other DNA

SEQ ID NO: 63228 - DNA, 80 bp, synthetic construct; identical to SEQ ID NO: 28725
  source 1..80: mol_type = other DNA

SEQ ID NO: 63229 - DNA, 80 bp, synthetic construct; identical to SEQ ID NO: 11085
  source 1..80: mol_type = other DNA

SEQ ID NO: 63230 - DNA, 80 bp, synthetic construct; identical to SEQ ID NO: 28727
  source 1..80: mol_type = other DNA

SEQ ID NO: 63231 - DNA, 80 bp, synthetic construct; identical to SEQ ID NO: 28728
  source 1..80: mol_type = other DNA

SEQ ID NO: 63232 - DNA, 80 bp, synthetic construct; identical to SEQ ID NO: 28729
  source 1..80: mol_type = other DNA

SEQ ID NO: 63233 - DNA, 80 bp, synthetic construct; identical to SEQ ID NO: 11086
  source 1..80: mol_type = other DNA

SEQ ID NO: 63234 - DNA, 80 bp, synthetic construct; identical to SEQ ID NO: 28731
  source 1..80: mol_type = other DNA

SEQ ID NO: 63235 - DNA, 80 bp, synthetic construct; identical to SEQ ID NO: 28732
  source 1..80: mol_type = other DNA

SEQ ID NO: 63236 - DNA, 80 bp, synthetic construct; identical to SEQ ID NO: 28733
  source 1..80: mol_type = other DNA

SEQ ID NO: 63237 - DNA, 80 bp, synthetic construct; identical to SEQ ID NO: 28734
  source 1..80: mol_type = other DNA

SEQ ID NO: 63238 - DNA, 80 bp, synthetic construct; identical to SEQ ID NO: 11087
  source 1..80: mol_type = other DNA

SEQ ID NO: 63239 - DNA, 80 bp, synthetic construct; identical to SEQ ID NO: 28736
  source 1..80: mol_type = other DNA

SEQ ID NO: 63240 - DNA, 80 bp, synthetic construct; identical to SEQ ID NO: 28737
  source 1..80: mol_type = other DNA

SEQ ID NO: 63241 - DNA, 80 bp, synthetic construct; identical to SEQ ID NO: 11088
  source 1..80: mol_type = other DNA

SEQ ID NO: 63242 - DNA, 80 bp, synthetic construct; identical to SEQ ID NO: 28740
  source 1..80: mol_type = other DNA

SEQ ID NO: 63243 - DNA, 80 bp, synthetic construct; identical to SEQ ID NO: 28741
  source 1..80: mol_type = other DNA

SEQ ID NO: 63244 - DNA, 80 bp, synthetic construct; identical to SEQ ID NO: 11089
  source 1..80: mol_type = other DNA

SEQ ID NO: 63245 - DNA, 80 bp, synthetic construct; identical to SEQ ID NO: 28743
  source 1..80: mol_type = other DNA

SEQ ID NO: 63246 - DNA, 80 bp, synthetic construct; identical to SEQ ID NO: 28745
  source 1..80: mol_type = other DNA

SEQ ID NO: 63247 - DNA, 80 bp, synthetic construct; identical to SEQ ID NO: 11090
  source 1..80: mol_type = other DNA

SEQ ID NO: 63248 - DNA, 80 bp, synthetic construct; identical to SEQ ID NO: 28747
  source 1..80: mol_type = other DNA

SEQ ID NO: 63249 - DNA, 80 bp, synthetic construct; identical to SEQ ID NO: 28748
  source 1..80: mol_type = other DNA

SEQ ID NO: 63250 - DNA, 80 bp, synthetic construct; identical to SEQ ID NO: 28749
  source 1..80: mol_type = other DNA

SEQ ID NO: 63251 - DNA, 80 bp, synthetic construct; identical to SEQ ID NO: 11091
  source 1..80: mol_type = other DNA

SEQ ID NO: 63252 - DNA, 80 bp, synthetic construct; identical to SEQ ID NO: 28751
  source 1..80: mol_type = other DNA

SEQ ID NO: 63253 - DNA, 80 bp, synthetic construct; identical to SEQ ID NO: 28752
  source 1..80: mol_type = other DNA

SEQ ID NO: 63254 - DNA, 80 bp, synthetic construct; identical to SEQ ID NO: 28753
  source 1..80: mol_type = other DNA

SEQ ID NO: 63255 - DNA, 80 bp, synthetic construct; identical to SEQ ID NO: 28754
  source 1..80: mol_type = other DNA

SEQ ID NO: 63256 - DNA, 80 bp, synthetic construct; identical to SEQ ID NO: 28755
  source 1..80: mol_type = other DNA

SEQ ID NO: 63257 - DNA, 80 bp, synthetic construct; identical to SEQ ID NO: 11092
  source 1..80: mol_type = other DNA

SEQ ID NO: 63258 - DNA, 80 bp, synthetic construct; identical to SEQ ID NO: 28757
  source 1..80: mol_type = other DNA

SEQ ID NO: 63259 - DNA, 80 bp, synthetic construct; identical to SEQ ID NO: 28758
  source 1..80: mol_type = other DNA

SEQ ID NO: 63260 - DNA, 80 bp, synthetic construct; identical to SEQ ID NO: 28759
  source 1..80: mol_type = other DNA

SEQ ID NO: 63261 - DNA, 80 bp, synthetic construct; identical to SEQ ID NO: 11093
  source 1..80: mol_type = other DNA

SEQ ID NO: 63262 - DNA, 80 bp, synthetic construct; identical to SEQ ID NO: 28761
  source 1..80: mol_type = other DNA

SEQ ID NO: 63263 - DNA, 80 bp, synthetic construct; identical to SEQ ID NO: 28762
  source 1..80: mol_type = other DNA

SEQ ID NO: 63264 - DNA, 80 bp, synthetic construct; identical to SEQ ID NO: 28763
  source 1..80: mol_type = other DNA

SEQ ID NO: 63265 - DNA, 80 bp, synthetic construct; identical to SEQ ID NO: 11094
  source 1..80: mol_type = other DNA

SEQ ID NO: 63266 - DNA, 80 bp, synthetic construct; identical to SEQ ID NO: 28765
  source 1..80: mol_type = other DNA

SEQ ID NO: 63267 - DNA, 80 bp, synthetic construct; identical to SEQ ID NO: 28766
  source 1..80: mol_type = other DNA

SEQ ID NO: 63268 - DNA, 80 bp, synthetic construct; identical to SEQ ID NO: 11095
  source 1..80: mol_type = other DNA

SEQ ID NO: 63269 - DNA, 80 bp, synthetic construct; identical to SEQ ID NO: 28768
  source 1..80: mol_type = other DNA

SEQ ID NO: 63270 - DNA, 80 bp, synthetic construct; identical to SEQ ID NO: 28769
  source 1..80: mol_type = other DNA

SEQ ID NO: 63271 - DNA, 80 bp, synthetic construct; identical to SEQ ID NO: 28770
  source 1..80: mol_type = other DNA

SEQ ID NO: 63272 - DNA, 80 bp, synthetic construct; identical to SEQ ID NO: 11096
  source 1..80: mol_type = other DNA

SEQ ID NO: 63273 - DNA, 80 bp, synthetic construct; identical to SEQ ID NO: 28772
  source 1..80: mol_type = other DNA

SEQ ID NO: 63274 - DNA, 80 bp, synthetic construct; identical to SEQ ID NO: 28773
  source 1..80: mol_type = other DNA

SEQ ID NO: 63275 - DNA, 80 bp, synthetic construct; identical to SEQ ID NO: 28774
  source 1..80: mol_type = other DNA

SEQ ID NO: 63276 - DNA, 80 bp, synthetic construct; identical to SEQ ID NO: 11097
  source 1..80: mol_type = other DNA

SEQ ID NO: 63277 - DNA, 80 bp, synthetic construct; identical to SEQ ID NO: 28777
  source 1..80: mol_type = other DNA

SEQ ID NO: 63278 - DNA, 80 bp, synthetic construct; identical to SEQ ID NO: 28778
  source 1..80: mol_type = other DNA

SEQ ID NO: 63279 - DNA, 80 bp, synthetic construct; identical to SEQ ID NO: 11098
  source 1..80: mol_type = other DNA

SEQ ID NO: 63280 - DNA, 80 bp, synthetic construct; identical to SEQ ID NO: 28780
  source 1..80: mol_type = other DNA

SEQ ID NO: 63281 - DNA, 80 bp, synthetic construct; identical to SEQ ID NO: 28781
  source 1..80: mol_type = other DNA

SEQ ID NO: 63282 - DNA, 80 bp, synthetic construct; identical to SEQ ID NO: 28782
  source 1..80: mol_type = other DNA

SEQ ID NO: 63283 - DNA, 80 bp, synthetic construct; identical to SEQ ID NO: 28783
  source 1..80: mol_type = other DNA

SEQ ID NO: 63284 - DNA, 80 bp, synthetic construct; identical to SEQ ID NO: 11099
  source 1..80: mol_type = other DNA

SEQ ID NO: 63285 - DNA, 80 bp, synthetic construct; identical to SEQ ID NO: 28785
  source 1..80: mol_type = other DNA

SEQ ID NO: 63286 - DNA, 80 bp, synthetic construct; identical to SEQ ID NO: 28786
  source 1..80: mol_type = other DNA

SEQ ID NO: 63287 - DNA, 80 bp, synthetic construct; identical to SEQ ID NO: 11100
  source 1..80: mol_type = other DNA

SEQ ID NO: 63288 - DNA, 80 bp, synthetic construct; identical to SEQ ID NO: 28788
  source 1..80: mol_type = other DNA

SEQ ID NO: 63289 - DNA, 80 bp, synthetic construct; identical to SEQ ID NO: 28789
  source 1..80: mol_type = other DNA

SEQ ID NO: 63290 - DNA, 80 bp, synthetic construct; identical to SEQ ID NO: 11101
  source 1..80: mol_type = other DNA

SEQ ID NO: 63291 - DNA, 80 bp, synthetic construct; identical to SEQ ID NO: 28792
  source 1..80: mol_type = other DNA

SEQ ID NO: 63292 - DNA, 80 bp, synthetic construct; identical to SEQ ID NO: 28793
  source 1..80: mol_type = other DNA

SEQ ID NO: 63293 - DNA, 80 bp, synthetic construct; identical to SEQ ID NO: 28794
  source 1..80: mol_type = other DNA

SEQ ID NO: 63294 - DNA, 80 bp, synthetic construct; identical to SEQ ID NO: 11102
  source 1..80: mol_type = other DNA

SEQ ID NO: 63295 - DNA, 80 bp, synthetic construct; identical to SEQ ID NO: 28796
  source 1..80: mol_type = other DNA

SEQ ID NO: 63296 - DNA, 80 bp, synthetic construct; identical to SEQ ID NO: 28797
  source 1..80: mol_type = other DNA

SEQ ID NO: 63297 - DNA, 80 bp, synthetic construct; identical to SEQ ID NO: 28798
  source 1..80: mol_type = other DNA

SEQ ID NO: 63298 - DNA, 80 bp, synthetic construct; identical to SEQ ID NO: 11103
  source 1..80: mol_type = other DNA

SEQ ID NO: 63299 - DNA, 80 bp, synthetic construct; identical to SEQ ID NO: 28800
  source 1..80: mol_type = other DNA

SEQ ID NO: 63300 - DNA, 80 bp, synthetic construct; identical to SEQ ID NO: 28801
  source 1..80: mol_type = other DNA

SEQ ID NO: 63301 - DNA, 80 bp, synthetic construct; identical to SEQ ID NO: 28802
  source 1..80: mol_type = other DNA

SEQ ID NO: 63302 - DNA, 80 bp, synthetic construct; identical to SEQ ID NO: 28803
  source 1..80: mol_type = other DNA

SEQ ID NO: 63303 - DNA, 80 bp, synthetic construct; identical to SEQ ID NO: 11104
  source 1..80: mol_type = other DNA

SEQ ID NO: 63304 - DNA, 80 bp, synthetic construct; identical to SEQ ID NO: 28805
  source 1..80: mol_type = other DNA

SEQ ID NO: 63305 - DNA, 80 bp, synthetic construct; identical to SEQ ID NO: 28806
  source 1..80: mol_type = other DNA

SEQ ID NO: 63306 - DNA, 80 bp, synthetic construct; identical to SEQ ID NO: 28807
  source 1..80: mol_type = other DNA

SEQ ID NO: 63307 - DNA, 80 bp, synthetic construct; identical to SEQ ID NO: 11105
  source 1..80: mol_type = other DNA

SEQ ID NO: 63308 - DNA, 80 bp, synthetic construct; identical to SEQ ID NO: 28809
  source 1..80: mol_type = other DNA

SEQ ID NO: 63309 - DNA, 80 bp, synthetic construct; identical to SEQ ID NO: 28810
  source 1..80: mol_type = other DNA

SEQ ID NO: 63310 - DNA, 80 bp, synthetic construct; identical to SEQ ID NO: 28811
  source 1..80: mol_type = other DNA

SEQ ID NO: 63311 - DNA, 80 bp, synthetic construct; identical to SEQ ID NO: 11106
  source 1..80: mol_type = other DNA

SEQ ID NO: 63312 - DNA, 80 bp, synthetic construct; identical to SEQ ID NO: 28813
  source 1..80: mol_type = other DNA

SEQ ID NO: 63313 - DNA, 80 bp, synthetic construct; identical to SEQ ID NO: 28814
  source 1..80: mol_type = other DNA

SEQ ID NO: 63314 - DNA, 80 bp, synthetic construct; identical to SEQ ID NO: 11107
  source 1..80: mol_type = other DNA

SEQ ID NO: 63315 - DNA, 80 bp, synthetic construct; identical to SEQ ID NO: 28816
  source 1..80: mol_type = other DNA

SEQ ID NO: 63316 - DNA, 80 bp, synthetic construct; identical to SEQ ID NO: 28817
  source 1..80: mol_type = other DNA

SEQ ID NO: 63317 - DNA, 80 bp, synthetic construct; identical to SEQ ID NO: 28818
  source 1..80: mol_type = other DNA

SEQ ID NO: 63318 - DNA, 80 bp, synthetic construct; identical to SEQ ID NO: 11108
  source 1..80: mol_type = other DNA

SEQ ID NO: 63319 - DNA, 80 bp, synthetic construct; identical to SEQ ID NO: 28820
  source 1..80: mol_type = other DNA

SEQ ID NO: 63320 - DNA, 80 bp, synthetic construct; identical to SEQ ID NO: 28821
  source 1..80: mol_type = other DNA

SEQ ID NO: 63321 - DNA, 80 bp, synthetic construct; identical to SEQ ID NO: 28822
  source 1..80: mol_type = other DNA

SEQ ID NO: 63322 - DNA, 80 bp, synthetic construct; identical to SEQ ID NO: 28823
  source 1..80: mol_type = other DNA

SEQ ID NO: 63323 - DNA, 80 bp, synthetic construct; identical to SEQ ID NO: 11109
  source 1..80: mol_type = other DNA

SEQ ID NO: 63324 - DNA, 80 bp, synthetic construct; identical to SEQ ID NO: 28825
  source 1..80: mol_type = other DNA

SEQ ID NO: 63325 - DNA, 80 bp, synthetic construct; identical to SEQ ID NO: 28826
  source 1..80: mol_type = other DNA

SEQ ID NO: 63326 - DNA, 80 bp, synthetic construct; identical to SEQ ID NO: 11110
  source 1..80: mol_type = other DNA

SEQ ID NO: 63327 - DNA, 80 bp, synthetic construct; identical to SEQ ID NO: 28828
  source 1..80: mol_type = other DNA

SEQ ID NO: 63328 - DNA, 80 bp, synthetic construct; identical to SEQ ID NO: 28829
  source 1..80: mol_type = other DNA

SEQ ID NO: 63329 - DNA, 80 bp, synthetic construct; identical to SEQ ID NO: 28831
  source 1..80: mol_type = other DNA

SEQ ID NO: 63330 - DNA, 80 bp, synthetic construct; identical to SEQ ID NO: 11111
  source 1..80: mol_type = other DNA

SEQ ID NO: 63331 - DNA, 80 bp, synthetic construct; identical to SEQ ID NO: 28833
  source 1..80: mol_type = other DNA

SEQ ID NO: 63332 - DNA, 80 bp, synthetic construct; identical to SEQ ID NO: 28834
  source 1..80: mol_type = other DNA

SEQ ID NO: 63333 - DNA, 80 bp, synthetic construct; identical to SEQ ID NO: 28835
  source 1..80: mol_type = other DNA

SEQ ID NO: 63334 - DNA, 80 bp, synthetic construct; identical to SEQ ID NO: 11112
  source 1..80: mol_type = other DNA

SEQ ID NO: 63335 - DNA, 80 bp, synthetic construct; identical to SEQ ID NO: 28837
  source 1..80: mol_type = other DNA

SEQ ID NO: 63336 - DNA, 80 bp, synthetic construct; identical to SEQ ID NO: 28838
  source 1..80: mol_type = other DNA

SEQ ID NO: 63337 - DNA, 80 bp, synthetic construct; identical to SEQ ID NO: 28839
  source 1..80: mol_type = other DNA

SEQ ID NO: 63338 - DNA, 80 bp, synthetic construct; identical to SEQ ID NO: 28840
  source 1..80: mol_type = other DNA

SEQ ID NO: 63339 - DNA, 80 bp, synthetic construct; identical to SEQ ID NO: 11113
  source 1..80: mol_type = other DNA

SEQ ID NO: 63340 - DNA, 80 bp, synthetic construct; identical to SEQ ID NO: 28842
  source 1..80: mol_type = other DNA

SEQ ID NO: 63341 - DNA, 80 bp, synthetic construct; identical to SEQ ID NO: 28843
  source 1..80: mol_type = other DNA

SEQ ID NO: 63342 - DNA, 80 bp, synthetic construct; identical to SEQ ID NO: 28844
  source 1..80: mol_type = other DNA

SEQ ID NO: 63343 - DNA, 80 bp, synthetic construct; identical to SEQ ID NO: 11114
  source 1..80: mol_type = other DNA

SEQ ID NO: 63344 - DNA, 80 bp, synthetic construct; identical to SEQ ID NO: 28846
  source 1..80: mol_type = other DNA

SEQ ID NO: 63345 - DNA, 80 bp, synthetic construct; identical to SEQ ID NO: 28847
  source 1..80: mol_type = other DNA

SEQ ID NO: 63346 - DNA, 80 bp, synthetic construct; identical to SEQ ID NO: 28848
  source 1..80: mol_type = other DNA

SEQ ID NO: 63347 - DNA, 80 bp, synthetic construct; identical to SEQ ID NO: 11115
  source 1..80: mol_type = other DNA

SEQ ID NO: 63348 - DNA, 80 bp, synthetic construct; identical to SEQ ID NO: 28850
  source 1..80: mol_type = other DNA

SEQ ID NO: 63349 - DNA, 80 bp, synthetic construct; identical to SEQ ID NO: 11116
  source 1..80: mol_type = other DNA

SEQ ID NO: 63350 - DNA, 80 bp, synthetic construct; identical to SEQ ID NO: 28853
  source 1..80: mol_type = other DNA

SEQ ID NO: 63351 - DNA, 80 bp, synthetic construct; identical to SEQ ID NO: 28854
  source 1..80: mol_type = other DNA

SEQ ID NO: 63352 - DNA, 80 bp, synthetic construct; identical to SEQ ID NO: 28855
  source 1..80: mol_type = other DNA

SEQ ID NO: 63353 - DNA, 80 bp, synthetic construct; identical to SEQ ID NO: 28856
  source 1..80: mol_type = other DNA

SEQ ID NO: 63354 - DNA, 80 bp, synthetic construct; identical to SEQ ID NO: 11117
  source 1..80: mol_type = other DNA

SEQ ID NO: 63355 - DNA, 80 bp, synthetic construct; identical to SEQ ID NO: 28858
  source 1..80: mol_type = other DNA

SEQ ID NO: 63356 - DNA, 80 bp, synthetic construct; identical to SEQ ID NO: 28859
  source 1..80: mol_type = other DNA

SEQ ID NO: 63357 - DNA, 80 bp, synthetic construct; identical to SEQ ID NO: 28860
  source 1..80: mol_type = other DNA

SEQ ID NO: 63358 - DNA, 80 bp, synthetic construct; identical to SEQ ID NO: 11118
  source 1..80: mol_type = other DNA

SEQ ID NO: 63359 - DNA, 80 bp, synthetic construct; identical to SEQ ID NO: 28862
  source 1..80: mol_type = other DNA

SEQ ID NO: 63360 - DNA, 80 bp, synthetic construct; identical to SEQ ID NO: 28863
  source 1..80: mol_type = other DNA

SEQ ID NO: 63361 - DNA, 80 bp, synthetic construct; identical to SEQ ID NO: 28864
  source 1..80: mol_type = other DNA

SEQ ID NO: 63362 - DNA, 80 bp, synthetic construct; identical to SEQ ID NO: 11119
  source 1..80: mol_type = other DNA

SEQ ID NO: 63363 - DNA, 80 bp, synthetic construct; identical to SEQ ID NO: 28866
  source 1..80: mol_type = other DNA

SEQ ID NO: 63364 - DNA, 80 bp, synthetic construct; identical to SEQ ID NO: 28867
  source 1..80: mol_type = other DNA

SEQ ID NO: 63365 - DNA, 80 bp, synthetic construct; identical to SEQ ID NO: 28868
  source 1..80: mol_type = other DNA

SEQ ID NO: 63366 - DNA, 80 bp, synthetic construct; identical to SEQ ID NO: 11120
  source 1..80: mol_type = other DNA

SEQ ID NO: 63367 - DNA, 80 bp, synthetic construct; identical to SEQ ID NO: 28870
  source 1..80: mol_type = other DNA

SEQ ID NO: 63368 - DNA, 80 bp, synthetic construct; identical to SEQ ID NO: 28871
  source 1..80: mol_type = other DNA

SEQ ID NO: 63369 - DNA, 80 bp, synthetic construct; identical to SEQ ID NO: 28872
  source 1..80: mol_type = other DNA

SEQ ID NO: 63370 - DNA, 80 bp, synthetic construct; identical to SEQ ID NO: 11121
  source 1..80: mol_type = other DNA

SEQ ID NO: 63371 - DNA, 80 bp, synthetic construct; identical to SEQ ID NO: 28874
  source 1..80: mol_type = other DNA

SEQ ID NO: 63372 - DNA, 80 bp, synthetic construct; identical to SEQ ID NO: 28875
  source 1..80: mol_type = other DNA

SEQ ID NO: 63373 - DNA, 80 bp, synthetic construct; identical to SEQ ID NO: 28876
  source 1..80: mol_type = other DNA

SEQ ID NO: 63374 - DNA, 80 bp, synthetic construct; identical to SEQ ID NO: 28877
  source 1..80: mol_type = other DNA

SEQ ID NO: 63375 - DNA, 80 bp, synthetic construct; identical to SEQ ID NO: 11122
  source 1..80: mol_type = other DNA

SEQ ID NO: 63376 - DNA, 80 bp, synthetic construct; identical to SEQ ID NO: 28879
  source 1..80: mol_type = other DNA

SEQ ID NO: 63377 - DNA, 80 bp, synthetic construct; identical to SEQ ID NO: 28880
  source 1..80: mol_type = other DNA

SEQ ID NO: 63378 - DNA, 80 bp, synthetic construct; identical to SEQ ID NO: 28881
  source 1..80: mol_type = other DNA

SEQ ID NO: 63379 - DNA, 80 bp, synthetic construct; identical to SEQ ID NO: 11123
  source 1..80: mol_type = other DNA

SEQ ID NO: 63380 - DNA, 80 bp, synthetic construct; identical to SEQ ID NO: 28883
  source 1..80: mol_type = other DNA

SEQ ID NO: 63381 - DNA, 80 bp, synthetic construct; identical to SEQ ID NO: 28884
  source 1..80: mol_type = other DNA

SEQ ID NO: 63382 - DNA, 80 bp, synthetic construct; identical to SEQ ID NO: 28885
  source 1..80: mol_type = other DNA

SEQ ID NO: 63383 - DNA, 80 bp, synthetic construct; identical to SEQ ID NO: 11124
  source 1..80: mol_type = other DNA

SEQ ID NO: 63384 - DNA, 80 bp, synthetic construct; identical to SEQ ID NO: 28887
  source 1..80: mol_type = other DNA

SEQ ID NO: 63385 - DNA, 80 bp, synthetic construct; identical to SEQ ID NO: 28888
  source 1..80: mol_type = other DNA

SEQ ID NO: 63386 - DNA, 80 bp, synthetic construct; identical to SEQ ID NO: 28889
  source 1..80: mol_type = other DNA

SEQ ID NO: 63387 - DNA, 80 bp, synthetic construct; identical to SEQ ID NO: 11125
  source 1..80: mol_type = other DNA

SEQ ID NO: 63388 - DNA, 80 bp, synthetic construct; identical to SEQ ID NO: 28891
  source 1..80: mol_type = other DNA

SEQ ID NO: 63389 - DNA, 80 bp, synthetic construct; identical to SEQ ID NO: 28892
  source 1..80: mol_type = other DNA

SEQ ID NO: 63390 - DNA, 80 bp, synthetic construct; identical to SEQ ID NO: 28893
  source 1..80: mol_type = other DNA

SEQ ID NO: 63391 - DNA, 80 bp, synthetic construct; identical to SEQ ID NO: 28894
  source 1..80: mol_type = other DNA

SEQ ID NO: 63392 - DNA, 80 bp, synthetic construct; identical to SEQ ID NO: 11126
  source 1..80: mol_type = other DNA

SEQ ID NO: 63393 - DNA, 80 bp, synthetic construct; identical to SEQ ID NO: 28896
  source 1..80: mol_type = other DNA

SEQ ID NO: 63394 - DNA, 80 bp, synthetic construct; identical to SEQ ID NO: 28897
  source 1..80: mol_type = other DNA

SEQ ID NO: 63395 - DNA, 80 bp, synthetic construct; identical to SEQ ID NO: 28898
  source 1..80: mol_type = other DNA

SEQ ID NO: 63396 - DNA, 80 bp, synthetic construct; identical to SEQ ID NO: 11127
  source 1..80: mol_type = other DNA

SEQ ID NO: 63397 - DNA, 80 bp, synthetic construct; identical to SEQ ID NO: 28900
  source 1..80: mol_type = other DNA

SEQ ID NO: 63398 - DNA, 80 bp, synthetic construct; identical to SEQ ID NO: 28901
  source 1..80: mol_type = other DNA

SEQ ID NO: 63399 - DNA, 80 bp, synthetic construct; identical to SEQ ID NO: 28902
  source 1..80: mol_type = other DNA

SEQ ID NO: 63400 - DNA, 80 bp, synthetic construct; identical to SEQ ID NO: 11128
  source 1..80: mol_type = other DNA

SEQ ID NO: 63401 - DNA, 80 bp, synthetic construct; identical to SEQ ID NO: 28904
  source 1..80: mol_type = other DNA

SEQ ID NO: 63402 - DNA, 80 bp, synthetic construct; identical to SEQ ID NO: 28905
  source 1..80: mol_type = other DNA

SEQ ID NO: 63403 - DNA, 80 bp, synthetic construct; identical to SEQ ID NO: 28906
  source 1..80: mol_type = other DNA

SEQ ID NO: 63404 - DNA, 80 bp, synthetic construct; identical to SEQ ID NO: 11129
  source 1..80: mol_type = other DNA

SEQ ID NO: 63405 - DNA, 80 bp, synthetic construct; identical to SEQ ID NO: 28908
  source 1..80: mol_type = other DNA

SEQ ID NO: 63406 - DNA, 80 bp, synthetic construct; identical to SEQ ID NO: 28909
  source 1..80: mol_type = other DNA

SEQ ID NO: 63407 - DNA, 80 bp, synthetic construct; identical to SEQ ID NO: 11130
  source 1..80: mol_type = other DNA

SEQ ID NO: 63408 - DNA, 80 bp, synthetic construct; identical to SEQ ID NO: 28911
  source 1..80: mol_type = other DNA

SEQ ID NO: 63409 - DNA, 80 bp, synthetic construct; identical to SEQ ID NO: 28912
  source 1..80: mol_type = other DNA

SEQ ID NO: 63410 - DNA, 80 bp, synthetic construct; identical to SEQ ID NO: 28913
  source 1..80: mol_type = other DNA

SEQ ID NO: 63411 - DNA, 80 bp, synthetic construct; identical to SEQ ID NO: 11131
  source 1..80: mol_type = other DNA

SEQ ID NO: 63412 - DNA, 80 bp, synthetic construct; identical to SEQ ID NO: 28915
  source 1..80: mol_type = other DNA

SEQ ID NO: 63413 - DNA, 80 bp, synthetic construct; identical to SEQ ID NO: 28916
  source 1..80: mol_type = other DNA

SEQ ID NO: 63414 - DNA, 80 bp, synthetic construct; identical to SEQ ID NO: 28917
  source 1..80: mol_type = other DNA

SEQ ID NO: 63415 - DNA, 80 bp, synthetic construct; identical to SEQ ID NO: 11132
  source 1..80: mol_type = other DNA

SEQ ID NO: 63416 - DNA, 80 bp, synthetic construct; identical to SEQ ID NO: 28919
  source 1..80: mol_type = other DNA

SEQ ID NO: 63417 - DNA, 80 bp, synthetic construct; identical to SEQ ID NO: 28920
  source 1..80: mol_type = other DNA

SEQ ID NO: 63418 - DNA, 80 bp, synthetic construct; identical to SEQ ID NO: 28921
  source 1..80: mol_type = other DNA

SEQ ID NO: 63419 - DNA, 80 bp, synthetic construct; identical to SEQ ID NO: 28922
  source 1..80: mol_type = other DNA

SEQ ID NO: 63420 - DNA, 80 bp, synthetic construct; identical to SEQ ID NO: 11133
  source 1..80: mol_type = other DNA

SEQ ID NO: 63421 - DNA, 80 bp, synthetic construct; identical to SEQ ID NO: 28924
  source 1..80: mol_type = other DNA

SEQ ID NO: 63422 - DNA, 80 bp, synthetic construct; identical to SEQ ID NO: 28925
  source 1..80: mol_type = other DNA

SEQ ID NO: 63423 - DNA, 80 bp, synthetic construct; identical to SEQ ID NO: 28926
  source 1..80: mol_type = other DNA

SEQ ID NO: 63424 - DNA, 80 bp, synthetic construct; identical to SEQ ID NO: 11134
  source 1..80: mol_type = other DNA

SEQ ID NO: 63425 - DNA, 80 bp, synthetic construct; identical to SEQ ID NO: 28928
  source 1..80: mol_type = other DNA

SEQ ID NO: 63426 - DNA, 80 bp, synthetic construct; identical to SEQ ID NO: 28929
  source 1..80: mol_type = other DNA

SEQ ID NO: 63427 - DNA, 80 bp, synthetic construct; identical to SEQ ID NO: 28930
  source 1..80: mol_type = other DNA

SEQ ID NO: 63428 - DNA, 80 bp, synthetic construct; identical to SEQ ID NO: 11135
  source 1..80: mol_type = other DNA

SEQ ID NO: 63429 - DNA, 80 bp, synthetic construct; identical to SEQ ID NO: 28932
  source 1..80: mol_type = other DNA

SEQ ID NO: 63430 - DNA, 80 bp, synthetic construct; identical to SEQ ID NO: 28933
  source 1..80: mol_type = other DNA

SEQ ID NO: 63431 - DNA, 80 bp, synthetic construct; identical to SEQ ID NO: 28934
  source 1..80: mol_type = other DNA

SEQ ID NO: 63432 - DNA, 80 bp, synthetic construct; identical to SEQ ID NO: 11136
  source 1..80: mol_type = other DNA

SEQ ID NO: 63433 - DNA, 80 bp, synthetic construct; identical to SEQ ID NO: 28936
  source 1..80: mol_type = other DNA

SEQ ID NO: 63434 - DNA, 80 bp, synthetic construct; identical to SEQ ID NO: 28937
  source 1..80: mol_type = other DNA

SEQ ID NO: 63435 - DNA, 80 bp, synthetic construct; identical to SEQ ID NO: 11137
  source 1..80: mol_type = other DNA

SEQ ID NO: 63436 - DNA, 80 bp, synthetic construct; identical to SEQ ID NO: 28940
  source 1..80: mol_type = other DNA

SEQ ID NO: 63437 - DNA, 80 bp, synthetic construct; identical to SEQ ID NO: 28941
  source 1..80: mol_type = other DNA

SEQ ID NO: 63438 - DNA, 80 bp, synthetic construct; identical to SEQ ID NO: 28942
  source 1..80: mol_type = other DNA

SEQ ID NO: 63439 - DNA, 80 bp, synthetic construct; identical to SEQ ID NO: 11138
  source 1..80: mol_type = other DNA

SEQ ID NO: 63440 - DNA, 80 bp, synthetic construct; identical to SEQ ID NO: 28945
  source 1..80: mol_type = other DNA

SEQ ID NO: 63441 - DNA, 80 bp, synthetic construct; identical to SEQ ID NO: 28946
  source 1..80: mol_type = other DNA

SEQ ID NO: 63442 - DNA, 80 bp, synthetic construct; identical to SEQ ID NO: 11139
  source 1..80: mol_type = other DNA

SEQ ID NO: 63443 - DNA, 80 bp, synthetic construct; identical to SEQ ID NO: 28949
  source 1..80: mol_type = other DNA

SEQ ID NO: 63444 - DNA, 80 bp, synthetic construct; identical to SEQ ID NO: 28950
  source 1..80: mol_type = other DNA

SEQ ID NO: 63445 - DNA, 80 bp, synthetic construct; identical to SEQ ID NO: 11140
  source 1..80: mol_type = other DNA

SEQ ID NO: 63446 - DNA, 80 bp, synthetic construct; identical to SEQ ID NO: 28952
  source 1..80: mol_type = other DNA

SEQ ID NO: 63447 - DNA, 80 bp, synthetic construct; identical to SEQ ID NO: 28953
  source 1..80: mol_type = other DNA

SEQ ID NO: 63448 - DNA, 80 bp, synthetic construct; identical to SEQ ID NO: 28954
  source 1..80: mol_type = other DNA

SEQ ID NO: 63449 - DNA, 80 bp, synthetic construct; identical to SEQ ID NO: 11141
  source 1..80: mol_type = other DNA

SEQ ID NO: 63450 - DNA, 80 bp, synthetic construct; identical to SEQ ID NO: 28956
  source 1..80: mol_type = other DNA

SEQ ID NO: 63451 - DNA, 80 bp, synthetic construct; identical to SEQ ID NO: 28957
  source 1..80: mol_type = other DNA

SEQ ID NO: 63452 - DNA, 80 bp, synthetic construct; identical to SEQ ID NO: 28958
  source 1..80: mol_type = other DNA

SEQ ID NO: 63453 - DNA, 80 bp, synthetic construct; identical to SEQ ID NO: 28959
  source 1..80: mol_type = other DNA

SEQ ID NO: 63454 - DNA, 80 bp, synthetic construct; identical to SEQ ID NO: 11142
  source 1..80: mol_type = other DNA

SEQ ID NO: 63455 - DNA, 80 bp, synthetic construct; identical to SEQ ID NO: 28961
  source 1..80: mol_type = other DNA

SEQ ID NO: 63456 - DNA, 80 bp, synthetic construct; identical to SEQ ID NO: 28962
  source 1..80: mol_type = other DNA

SEQ ID NO: 63457 - DNA, 80 bp, synthetic construct; identical to SEQ ID NO: 28963
  source 1..80: mol_type = other DNA

SEQ ID NO: 63458 - DNA, 80 bp, synthetic construct; identical to SEQ ID NO: 11143
  source 1..80: mol_type = other DNA

SEQ ID NO: 63459 - DNA, 80 bp, synthetic construct; identical to SEQ ID NO: 28965
  source 1..80: mol_type = other DNA

SEQ ID NO: 63460 - DNA, 80 bp, synthetic construct; identical to SEQ ID NO: 28966
  source 1..80: mol_type = other DNA

SEQ ID NO: 63461 - DNA, 80 bp, synthetic construct; identical to SEQ ID NO: 28967
  source 1..80: mol_type = other DNA

SEQ ID NO: 63462 - DNA, 80 bp, synthetic construct; identical to SEQ ID NO: 28968
  source 1..80: mol_type = other DNA

SEQ ID NO: 63463 - DNA, 80 bp, synthetic construct; identical to SEQ ID NO: 11144
  source 1..80: mol_type = other DNA

SEQ ID NO: 63464 - DNA, 80 bp, synthetic construct; identical to SEQ ID NO: 28970
  source 1..80: mol_type = other DNA

SEQ ID NO: 63465 - DNA, 80 bp, synthetic construct; identical to SEQ ID NO: 28971
  source 1..80: mol_type = other DNA

SEQ ID NO: 63466 - DNA, 80 bp, synthetic construct; identical to SEQ ID NO: 11145
  source 1..80: mol_type = other DNA

SEQ ID NO: 63467 - DNA, 80 bp, synthetic construct; identical to SEQ ID NO: 28973
  source 1..80: mol_type = other DNA

SEQ ID NO: 63468 - DNA, 80 bp, synthetic construct; identical to SEQ ID NO: 28974
  source 1..80: mol_type = other DNA

SEQ ID NO: 63469 - DNA, 80 bp, synthetic construct; identical to SEQ ID NO: 28975
  source 1..80: mol_type = other DNA

SEQ ID NO: 63470 - DNA, 80 bp, synthetic construct; identical to SEQ ID NO: 11146
  source 1..80: mol_type = other DNA

SEQ ID NO: 63471 - DNA, 80 bp, synthetic construct; identical to SEQ ID NO: 28977
  source 1..80: mol_type = other DNA

SEQ ID NO: 63472 - DNA, 80 bp, synthetic construct; identical to SEQ ID NO: 28978
  source 1..80: mol_type = other DNA

SEQ ID NO: 63473 - DNA, 80 bp, synthetic construct; identical to SEQ ID NO: 28979
  source 1..80: mol_type = other DNA

SEQ ID NO: 63474 - DNA, 80 bp, synthetic construct; identical to SEQ ID NO: 28980
  source 1..80: mol_type = other DNA

SEQ ID NO: 63475 - DNA, 80 bp, synthetic construct; identical to SEQ ID NO: 11147
  source 1..80: mol_type = other DNA

SEQ ID NO: 63476 - DNA, 80 bp, synthetic construct; identical to SEQ ID NO: 28982
  source 1..80: mol_type = other DNA

SEQ ID NO: 63477 - DNA, 80 bp, synthetic construct; identical to SEQ ID NO: 28983
  source 1..80: mol_type = other DNA

SEQ ID NO: 63478 - DNA, 80 bp, synthetic construct; identical to SEQ ID NO: 11148
  source 1..80: mol_type = other DNA

SEQ ID NO: 63479 - DNA, 80 bp, synthetic construct; identical to SEQ ID NO: 28985
  source 1..80: mol_type = other DNA

SEQ ID NO: 63480 - DNA, 80 bp, synthetic construct; identical to SEQ ID NO: 28986
  source 1..80: mol_type = other DNA

SEQ ID NO: 63481 - DNA, 80 bp, synthetic construct; identical to SEQ ID NO: 28987
  source 1..80: mol_type = other DNA

SEQ ID NO: 63482 - DNA, 80 bp, synthetic construct; identical to SEQ ID NO: 11149
  source 1..80: mol_type = other DNA

SEQ ID NO: 63483 - DNA, 80 bp, synthetic construct; identical to SEQ ID NO: 28989
  source 1..80: mol_type = other DNA

SEQ ID NO: 63484 - DNA, 80 bp, synthetic construct; identical to SEQ ID NO: 28990
  source 1..80: mol_type = other DNA

SEQ ID NO: 63485 - DNA, 80 bp, synthetic construct; identical to SEQ ID NO: 28991
  source 1..80: mol_type = other DNA

SEQ ID NO: 63486 - DNA, 80 bp, synthetic construct; identical to SEQ ID NO: 28992
  source 1..80: mol_type = other DNA

SEQ ID NO: 63487 - DNA, 80 bp, synthetic construct; identical to SEQ ID NO: 11150
  source 1..80: mol_type = other DNA

SEQ ID NO: 63488 - DNA, 80 bp, synthetic construct; identical to SEQ ID NO: 28994
  source 1..80: mol_type = other DNA

SEQ ID NO: 63489 - DNA, 80 bp, synthetic construct; identical to SEQ ID NO: 28995
  source 1..80: mol_type = other DNA

SEQ ID NO: 63490 - DNA, 80 bp, synthetic construct; identical to SEQ ID NO: 11151
  source 1..80: mol_type = other DNA

SEQ ID NO: 63491 - DNA, 80 bp, synthetic construct; identical to SEQ ID NO: 28997
  source 1..80: mol_type = other DNA

SEQ ID NO: 63492 - DNA, 80 bp, synthetic construct; identical to SEQ ID NO: 28998
  source 1..80: mol_type = other DNA

SEQ ID NO: 63493 - DNA, 80 bp, synthetic construct; identical to SEQ ID NO: 28999
  source 1..80: mol_type = other DNA

SEQ ID NO: 63494 - DNA, 80 bp, synthetic construct; identical to SEQ ID NO: 29000
  source 1..80: mol_type = other DNA

SEQ ID NO: 63495 - DNA, 80 bp, synthetic construct; identical to SEQ ID NO: 11152
  source 1..80: mol_type = other DNA

SEQ ID NO: 63496 - DNA, 80 bp, synthetic construct; identical to SEQ ID NO: 29002
  source 1..80: mol_type = other DNA

SEQ ID NO: 63497 - DNA, 80 bp, synthetic construct; identical to SEQ ID NO: 29003
  source 1..80: mol_type = other DNA

SEQ ID NO: 63498 - DNA, 80 bp, synthetic construct; identical to SEQ ID NO: 11153
  source 1..80: mol_type = other DNA

SEQ ID NO: 63499 - DNA, 80 bp, synthetic construct; identical to SEQ ID NO: 29005
  source 1..80: mol_type = other DNA

SEQ ID NO: 63500 - DNA, 80 bp, synthetic construct; identical to SEQ ID NO: 29007
  source 1..80: mol_type = other DNA

SEQ ID NO: 63501 - DNA, 80 bp, synthetic construct; identical to SEQ ID NO: 11154
  source 1..80: mol_type = other DNA

SEQ ID NO: 63502 - DNA, 80 bp, synthetic construct; identical to SEQ ID NO: 29009
  source 1..80: mol_type = other DNA

SEQ ID NO: 63503 - DNA, 80 bp, synthetic construct; identical to SEQ ID NO: 29010
  source 1..80: mol_type = other DNA

SEQ ID NO: 63504 - DNA, 80 bp, synthetic construct; identical to SEQ ID NO: 29011
  source 1..80: mol_type = other DNA

SEQ ID NO: 63505 - DNA, 80 bp, synthetic construct; identical to SEQ ID NO: 29012
  source 1..80: mol_type = other DNA

SEQ ID NO: 63506 - DNA, 80 bp, synthetic construct; identical to SEQ ID NO: 11155
  source 1..80: mol_type = other DNA

SEQ ID NO: 63507 - DNA, 80 bp, synthetic construct; identical to SEQ ID NO: 29014
  source 1..80: mol_type = other DNA

SEQ ID NO: 63508 - DNA, 80 bp, synthetic construct; identical to SEQ ID NO: 29015
  source 1..80: mol_type = other DNA

SEQ ID NO: 63509 - DNA, 80 bp, synthetic construct; identical to SEQ ID NO: 11156
  source 1..80: mol_type = other DNA

SEQ ID NO: 63510 - DNA, 80 bp, synthetic construct; identical to SEQ ID NO: 29017
  source 1..80: mol_type = other DNA

SEQ ID NO: 63511 - DNA, 80 bp, synthetic construct; identical to SEQ ID NO: 29018
  source 1..80: mol_type = other DNA

SEQ ID NO: 63512 - DNA, 80 bp, synthetic construct; identical to SEQ ID NO: 29019
  source 1..80: mol_type = other DNA

SEQ ID NO: 63513 - DNA, 80 bp, synthetic construct; identical to SEQ ID NO: 29020
  source 1..80: mol_type = other DNA

SEQ ID NO: 63514 - DNA, 80 bp, synthetic construct; identical to SEQ ID NO: 11157
  source 1..80: mol_type = other DNA

SEQ ID NO: 63515 - DNA, 80 bp, synthetic construct; identical to SEQ ID NO: 29022
  source 1..80: mol_type = other DNA

SEQ ID NO: 63516 - DNA, 80 bp, synthetic construct; identical to SEQ ID NO: 29023
  source 1..80: mol_type = other DNA

SEQ ID NO: 63517 - DNA, 80 bp, synthetic construct; identical to SEQ ID NO: 11158
  source 1..80: mol_type = other DNA

SEQ ID NO: 63518 - DNA, 80 bp, synthetic construct; identical to SEQ ID NO: 29025
  source 1..80: mol_type = other DNA

SEQ ID NO: 63519 - DNA, 80 bp, synthetic construct; identical to SEQ ID NO: 29026
  source 1..80: mol_type = other DNA

SEQ ID NO: 63520 - DNA, 80 bp, synthetic construct; identical to SEQ ID NO: 29027
  source 1..80: mol_type = other DNA

SEQ ID NO: 63521 - DNA, 80 bp, synthetic construct; identical to SEQ ID NO: 29028
  source 1..80: mol_type = other DNA

SEQ ID NO: 63522 - DNA, 80 bp, synthetic construct; identical to SEQ ID NO: 11159
  source 1..80: mol_type = other DNA

SEQ ID NO: 63523 - DNA, 80 bp, synthetic construct; identical to SEQ ID NO: 29030
  source 1..80: mol_type = other DNA

SEQ ID NO: 63524 - DNA, 80 bp, synthetic construct; identical to SEQ ID NO: 29031
  source 1..80: mol_type = other DNA

SEQ ID NO: 63525 - DNA, 80 bp, synthetic construct; identical to SEQ ID NO: 29032
  source 1..80: mol_type = other DNA

SEQ ID NO: 63526 - DNA, 80 bp, synthetic construct; identical to SEQ ID NO: 11160
  source 1..80: mol_type = other DNA

SEQ ID NO: 63527 - DNA, 80 bp, synthetic construct; identical to SEQ ID NO: 29034
  source 1..80: mol_type = other DNA

SEQ ID NO: 63528 - DNA, 80 bp, synthetic construct; identical to SEQ ID NO: 29035
  source 1..80: mol_type = other DNA

SEQ ID NO: 63529 - DNA, 80 bp, synthetic construct; identical to SEQ ID NO: 29036
  source 1..80: mol_type = other DNA

SEQ ID NO: 63530 - DNA, 80 bp, synthetic construct; identical to SEQ ID NO: 11161
  source 1..80: mol_type = other DNA

SEQ ID NO: 63531 - DNA, 80 bp, synthetic construct; identical to SEQ ID NO: 29038
  source 1..80: mol_type = other DNA

SEQ ID NO: 63532 - DNA, 80 bp, synthetic construct; identical to SEQ ID NO: 29039
  source 1..80: mol_type = other DNA

SEQ ID NO: 63533 - DNA, 80 bp, synthetic construct; identical to SEQ ID NO: 11162
  source 1..80: mol_type = other DNA

SEQ ID NO: 63534 - DNA, 80 bp, synthetic construct; identical to SEQ ID NO: 29041
  source 1..80: mol_type = other DNA

SEQ ID NO: 63535 - DNA, 80 bp, synthetic construct; identical to SEQ ID NO: 29042
  source 1..80: mol_type = other DNA

SEQ ID NO: 63536 - DNA, 80 bp, synthetic construct; identical to SEQ ID NO: 29044
  source 1..80: mol_type = other DNA

SEQ ID NO: 63537 - DNA, 80 bp, synthetic construct; identical to SEQ ID NO: 11163
  source 1..80: mol_type = other DNA

SEQ ID NO: 63538 - DNA, 80 bp, synthetic construct; identical to SEQ ID NO: 29046
  source 1..80: mol_type = other DNA

SEQ ID NO: 63539 - DNA, 80 bp, synthetic construct; identical to SEQ ID NO: 29047
  source 1..80: mol_type = other DNA

SEQ ID NO: 63540 - DNA, 80 bp, synthetic construct; identical to SEQ ID NO: 29048
  source 1..80: mol_type = other DNA

SEQ ID NO: 63541 - DNA, 80 bp, synthetic construct; identical to SEQ ID NO: 11164
  source 1..80: mol_type = other DNA

SEQ ID NO: 63542 - DNA, 80 bp, synthetic construct; identical to SEQ ID NO: 29050
  source 1..80: mol_type = other DNA

SEQ ID NO: 63543 - DNA, 80 bp, synthetic construct; identical to SEQ ID NO: 29051
  source 1..80: mol_type = other DNA

SEQ ID NO: 63544 - DNA, 80 bp, synthetic construct; identical to SEQ ID NO: 29052
  source 1..80: mol_type = other DNA

SEQ ID NO: 63545 - DNA, 80 bp, synthetic construct; identical to SEQ ID NO: 11165
  source 1..80: mol_type = other DNA

SEQ ID NO: 63546 - DNA, 80 bp, synthetic construct; identical to SEQ ID NO: 29054
  source 1..80: mol_type = other DNA

SEQ ID NO: 63547 - DNA, 80 bp, synthetic construct; identical to SEQ ID NO: 29055
  source 1..80: mol_type = other DNA

SEQ ID NO: 63548 - DNA, 80 bp, synthetic construct; identical to SEQ ID NO: 29056
  source 1..80: mol_type = other DNA

SEQ ID NO: 63549 - DNA, 80 bp, synthetic construct; identical to SEQ ID NO: 11166
  source 1..80: mol_type = other DNA

SEQ ID NO: 63550 - DNA, 80 bp, synthetic construct; identical to SEQ ID NO: 29058
  source 1..80: mol_type = other DNA

SEQ ID NO: 63551 - DNA, 80 bp, synthetic construct; identical to SEQ ID NO: 29059
  source 1..80: mol_type = other DNA

SEQ ID NO: 63552 - DNA, 80 bp, synthetic construct; identical to SEQ ID NO: 11167
  source 1..80: mol_type = other DNA

SEQ ID NO: 63553 - DNA, 80 bp, synthetic construct; identical to SEQ ID NO: 29062
  source 1..80: mol_type = other DNA

SEQ ID NO: 63554 - DNA, 80 bp, synthetic construct; identical to SEQ ID NO: 29063
  source 1..80: mol_type = other DNA

SEQ ID NO: 63555 - DNA, 80 bp, synthetic construct; identical to SEQ ID NO: 29064
  source 1..80: mol_type = other DNA

SEQ ID NO: 63556 - DNA, 80 bp, synthetic construct; identical to SEQ ID NO: 11168
  source 1..80: mol_type = other DNA

SEQ ID NO: 63557 - DNA, 80 bp, synthetic construct; identical to SEQ ID NO: 29066
  source 1..80: mol_type = other DNA

SEQ ID NO: 63558 - DNA, 80 bp, synthetic construct; identical to SEQ ID NO: 29067
  source 1..80: mol_type = other DNA

SEQ ID NO: 63559 - DNA, 80 bp, synthetic construct; identical to SEQ ID NO: 29068
  source 1..80: mol_type = other DNA

SEQ ID NO: 63560 - DNA, 80 bp, synthetic construct; identical to SEQ ID NO: 11169
  source 1..80: mol_type = other DNA

SEQ ID NO: 63561 - DNA, 80 bp, synthetic construct; identical to SEQ ID NO: 29070
  source 1..80: mol_type = other DNA

SEQ ID NO: 63562 - DNA, 80 bp, synthetic construct; identical to SEQ ID NO: 29071
  source 1..80: mol_type = other DNA

SEQ ID NO: 63563 - DNA, 80 bp, synthetic construct; identical to SEQ ID NO: 11170
  source 1..80: mol_type = other DNA

SEQ ID NO: 63564 - DNA, 80 bp, synthetic construct; identical to SEQ ID NO: 29073
  source 1..80: mol_type = other DNA

SEQ ID NO: 63565 - DNA, 80 bp, synthetic construct; identical to SEQ ID NO: 29074
  source 1..80: mol_type = other DNA

SEQ ID NO: 63566 - DNA, 80 bp, synthetic construct; identical to SEQ ID NO: 29075
  source 1..80: mol_type = other DNA

SEQ ID NO: 63567 - DNA, 80 bp, synthetic construct; identical to SEQ ID NO: 29076
  source 1..80: mol_type = other DNA

SEQ ID NO: 63568 - DNA, 80 bp, synthetic construct; identical to SEQ ID NO: 11171
  source 1..80: mol_type = other DNA

SEQ ID NO: 63569 - DNA, 80 bp, synthetic construct; identical to SEQ ID NO: 29078
  source 1..80: mol_type = other DNA

SEQ ID NO: 63570 - DNA, 80 bp, synthetic construct; identical to SEQ ID NO: 29079
  source 1..80: mol_type = other DNA

SEQ ID NO: 63571 - DNA, 80 bp, synthetic construct; identical to SEQ ID NO: 11172
  source 1..80: mol_type = other DNA

SEQ ID NO: 63572 - DNA, 80 bp, synthetic construct; identical to SEQ ID NO: 29081
  source 1..80: mol_type = other DNA

SEQ ID NO: 63573 - DNA, 80 bp, synthetic construct; identical to SEQ ID NO: 29083
  source 1..80: mol_type = other DNA

SEQ ID NO: 63574 - DNA, 80 bp, synthetic construct; identical to SEQ ID NO: 29084
  source 1..80: mol_type = other DNA

SEQ ID NO: 63575 - DNA, 80 bp, synthetic construct; identical to SEQ ID NO: 11173
  source 1..80: mol_type = other DNA

SEQ ID NO: 63576 - DNA, 80 bp, synthetic construct; identical to SEQ ID NO: 29086
  source 1..80: mol_type = other DNA

SEQ ID NO: 63577 - DNA, 80 bp, synthetic construct; identical to SEQ ID NO: 29087
  source 1..80: mol_type = other DNA

SEQ ID NO: 63578 - DNA, 80 bp, synthetic construct; identical to SEQ ID NO: 11174
  source 1..80: mol_type = other DNA

SEQ ID NO: 63579 - DNA, 80 bp, synthetic construct; identical to SEQ ID NO: 29090
  source 1..80: mol_type = other DNA

SEQ ID NO: 63580 - DNA, 80 bp, synthetic construct; identical to SEQ ID NO: 29091
  source 1..80: mol_type = other DNA

SEQ ID NO: 63581 - DNA, 80 bp, synthetic construct; identical to SEQ ID NO: 11175
  source 1..80: mol_type = other DNA

SEQ ID NO: 63582 - DNA, 80 bp, synthetic construct; identical to SEQ ID NO: 29094
  source 1..80: mol_type = other DNA

SEQ ID NO: 63583 - DNA, 80 bp, synthetic construct; identical to SEQ ID NO: 29095
  source 1..80: mol_type = other DNA

SEQ ID NO: 63584 - DNA, 80 bp, synthetic construct; identical to SEQ ID NO: 11176
  source 1..80: mol_type = other DNA

SEQ ID NO: 63585 - DNA, 80 bp, synthetic construct; identical to SEQ ID NO: 29097
  source 1..80: mol_type = other DNA

SEQ ID NO: 63586 - DNA, 80 bp, synthetic construct; identical to SEQ ID NO: 29098
  source 1..80: mol_type = other DNA

SEQ ID NO: 63587 - DNA, 80 bp, synthetic construct; identical to SEQ ID NO: 29099
  source 1..80: mol_type = other DNA

SEQ ID NO: 63588 - DNA, 80 bp, synthetic construct; identical to SEQ ID NO: 29100
  source 1..80: mol_type = other DNA

SEQ ID NO: 63589 - DNA, 80 bp, synthetic construct; identical to SEQ ID NO: 11177
  source 1..80: mol_type = other DNA

SEQ ID NO: 63590 - DNA, 80 bp, synthetic construct; identical to SEQ ID NO: 29102
  source 1..80: mol_type = other DNA

SEQ ID NO: 63591 - DNA, 80 bp, synthetic construct; identical to SEQ ID NO: 29103
  source 1..80: mol_type = other DNA

SEQ ID NO: 63592 - DNA, 80 bp, synthetic construct; identical to SEQ ID NO: 29104
  source 1..80: mol_type = other DNA

SEQ ID NO: 63593 - DNA, 80 bp, synthetic construct; identical to SEQ ID NO: 29105
  source 1..80: mol_type = other DNA

SEQ ID NO: 63594 - DNA, 80 bp, synthetic construct; identical to SEQ ID NO: 11178
  source 1..80: mol_type = other DNA

SEQ ID NO: 63595 - DNA, 80 bp, synthetic construct; identical to SEQ ID NO: 29107
  source 1..80: mol_type = other DNA

SEQ ID NO: 63596 - DNA, 80 bp, synthetic construct; identical to SEQ ID NO: 29108
  source 1..80: mol_type = other DNA

SEQ ID NO: 63597 - DNA, 80 bp, synthetic construct; identical to SEQ ID NO: 29109
  source 1..80: mol_type = other DNA

SEQ ID NO: 63598 - DNA, 80 bp, synthetic construct; identical to SEQ ID NO: 29110
  source 1..80: mol_type = other DNA

SEQ ID NO: 63599 - DNA, 80 bp, synthetic construct; identical to SEQ ID NO: 11179
  source 1..80: mol_type = other DNA

SEQ ID NO: 63600 - DNA, 80 bp, synthetic construct; identical to SEQ ID NO: 29112
  source 1..80: mol_type = other DNA

SEQ ID NO: 63601 - DNA, 80 bp, synthetic construct; identical to SEQ ID NO: 29113
  source 1..80: mol_type = other DNA

SEQ ID NO: 63602 - DNA, 80 bp, synthetic construct; identical to SEQ ID NO: 29115
  source 1..80: mol_type = other DNA

SEQ ID NO: 63603 - DNA, 80 bp, synthetic construct; identical to SEQ ID NO: 11181
  source 1..80: mol_type = other DNA

SEQ ID NO: 63604 - DNA, 80 bp, synthetic construct; identical to SEQ ID NO: 29118
  source 1..80: mol_type = other DNA

SEQ ID NO: 63605 - DNA, 80 bp, synthetic construct; identical to SEQ ID NO: 29120
  source 1..80: mol_type = other DNA

SEQ ID NO: 63606 - DNA, 80 bp, synthetic construct; identical to SEQ ID NO: 29121
  source 1..80: mol_type = other DNA

SEQ ID NO: 63607 - DNA, 80 bp, synthetic construct; identical to SEQ ID NO: 11182
  source 1..80: mol_type = other DNA

SEQ ID NO: 63608 - DNA, 80 bp, synthetic construct; identical to SEQ ID NO: 29123
  source 1..80: mol_type = other DNA

SEQ ID NO: 63609 - DNA, 80 bp, synthetic construct; identical to SEQ ID NO: 29124
  source 1..80: mol_type = other DNA

SEQ ID NO: 63610 - DNA, 80 bp, synthetic construct; identical to SEQ ID NO: 29125
  source 1..80: mol_type = other DNA

SEQ ID NO: 63611 - DNA, 80 bp, synthetic construct; identical to SEQ ID NO: 11183
  source 1..80: mol_type = other DNA

SEQ ID NO: 63612 - DNA, 80 bp, synthetic construct; identical to SEQ ID NO: 29127
  source 1..80: mol_type = other DNA

SEQ ID NO: 63613 - DNA, 80 bp, synthetic construct; identical to SEQ ID NO: 29128
  source 1..80: mol_type = other DNA

SEQ ID NO: 63614 - DNA, 80 bp, synthetic construct; identical to SEQ ID NO: 11184
  source 1..80: mol_type = other DNA

SEQ ID NO: 63615 - DNA, 80 bp, synthetic construct; identical to SEQ ID NO: 29130
  source 1..80: mol_type = other DNA

SEQ ID NO: 63616 - DNA, 80 bp, synthetic construct; identical to SEQ ID NO: 29132
  source 1..80: mol_type = other DNA

SEQ ID NO: 63617 - DNA, 80 bp, synthetic construct; identical to SEQ ID NO: 11185
  source 1..80: mol_type = other DNA

SEQ ID NO: 63618 - DNA, 80 bp, synthetic construct; identical to SEQ ID NO: 29134
  source 1..80: mol_type = other DNA

SEQ ID NO: 63619 - DNA, 80 bp, synthetic construct; identical to SEQ ID NO: 29135
  source 1..80: mol_type = other DNA

SEQ ID NO: 63620 - DNA, 80 bp, synthetic construct; identical to SEQ ID NO: 29136
  source 1..80: mol_type = other DNA

SEQ ID NO: 63621 - DNA, 80 bp, synthetic construct; identical to SEQ ID NO: 11186
  source 1..80: mol_type = other DNA

SEQ ID NO: 63622 - DNA, 80 bp, synthetic construct; identical to SEQ ID NO: 29138
  source 1..80: mol_type = other DNA

SEQ ID NO: 63623 - DNA, 80 bp, synthetic construct; identical to SEQ ID NO: 29139
  source 1..80: mol_type = other DNA

SEQ ID NO: 63624 - DNA, 80 bp, synthetic construct; identical to SEQ ID NO: 29140
  source 1..80: mol_type = other DNA

SEQ ID NO: 63625 - DNA, 80 bp, synthetic construct; identical to SEQ ID NO: 11187
  source 1..80: mol_type = other DNA

SEQ ID NO: 63626 - DNA, 80 bp, synthetic construct; identical to SEQ ID NO: 29142
  source 1..80: mol_type = other DNA

SEQ ID NO: 63627 - DNA, 80 bp, synthetic construct; identical to SEQ ID NO: 29143
  source 1..80: mol_type = other DNA

SEQ ID NO: 63628 - DNA, 80 bp, synthetic construct; identical to SEQ ID NO: 29144
  source 1..80: mol_type = other DNA

SEQ ID NO: 63629 - DNA, 80 bp, synthetic construct; identical to SEQ ID NO: 11188
  source 1..80: mol_type = other DNA

SEQ ID NO: 63630 - DNA, 80 bp, synthetic construct; identical to SEQ ID NO: 29146
  source 1..80: mol_type = other DNA

SEQ ID NO: 63631 - DNA, 80 bp, synthetic construct; identical to SEQ ID NO: 29147
  source 1..80: mol_type = other DNA

SEQ ID NO: 63632 - DNA, 80 bp, synthetic construct; identical to SEQ ID NO: 29148
  source 1..80: mol_type = other DNA

SEQ ID NO: 63633 - DNA, 80 bp, synthetic construct; identical to SEQ ID NO: 29149
  source 1..80: mol_type = other DNA

SEQ ID NO: 63634 - DNA, 80 bp, synthetic construct; identical to SEQ ID NO: 11189
  source 1..80: mol_type = other DNA

SEQ ID NO: 63635 - DNA, 80 bp, synthetic construct; identical to SEQ ID NO: 29151
  source 1..80: mol_type = other DNA

SEQ ID NO: 63636 - DNA, 80 bp, synthetic construct; identical to SEQ ID NO: 29152
  source 1..80: mol_type = other DNA

SEQ ID NO: 63637 - DNA, 80 bp, synthetic construct; identical to SEQ ID NO: 11190
  source 1..80: mol_type = other DNA

SEQ ID NO: 63638 - DNA, 80 bp, synthetic construct; identical to SEQ ID NO: 29154
  source 1..80: mol_type = other DNA

SEQ ID NO: 63639 - DNA, 80 bp, synthetic construct; identical to SEQ ID NO: 29155
  source 1..80: mol_type = other DNA

SEQ ID NO: 63640 - DNA, 80 bp, synthetic construct; identical to SEQ ID NO: 29156
  source 1..80: mol_type = other DNA

SEQ ID NO: 63641 - DNA, 80 bp, synthetic construct; identical to SEQ ID NO: 11191
  source 1..80: mol_type = other DNA

SEQ ID NO: 63642 - DNA, 80 bp, synthetic construct; identical to SEQ ID NO: 29158
  source 1..80: mol_type = other DNA

SEQ ID NO: 63643 - DNA, 80 bp, synthetic construct; identical to SEQ ID NO: 29159
  source 1..80: mol_type = other DNA

SEQ ID NO: 63644 - DNA, 80 bp, synthetic construct; identical to SEQ ID NO: 11192
  source 1..80: mol_type = other DNA

SEQ ID NO: 63645 - DNA, 80 bp, synthetic construct; identical to SEQ ID NO: 29162
  source 1..80: mol_type = other DNA

SEQ ID NO: 63646 - DNA, 80 bp, synthetic construct; identical to SEQ ID NO: 29163
  source 1..80: mol_type = other DNA

SEQ ID NO: 63647 - DNA, 80 bp, synthetic construct; identical to SEQ ID NO: 29164
  source 1..80: mol_type = other DNA

SEQ ID NO: 63648 - DNA, 80 bp, synthetic construct; identical to SEQ ID NO: 11193
  source 1..80: mol_type = other DNA

SEQ ID NO: 63649 - DNA, 80 bp, synthetic construct; identical to SEQ ID NO: 29166
  source 1..80: mol_type = other DNA

SEQ ID NO: 63650 - DNA, 80 bp, synthetic construct; identical to SEQ ID NO: 29167
  source 1..80: mol_type = other DNA

SEQ ID NO: 63651 - DNA, 80 bp, synthetic construct; identical to SEQ ID NO: 29168
  source 1..80: mol_type = other DNA

SEQ ID NO: 63652 - DNA, 80 bp, synthetic construct; identical to SEQ ID NO: 11194
  source 1..80: mol_type = other DNA

SEQ ID NO: 63653 - DNA, 80 bp, synthetic construct; identical to SEQ ID NO: 29170
  source 1..80: mol_type = other DNA

SEQ ID NO: 63654 - DNA, 80 bp, synthetic construct; identical to SEQ ID NO: 29171
  source 1..80: mol_type = other DNA

SEQ ID NO: 63655 - DNA, 80 bp, synthetic construct; identical to SEQ ID NO: 29172
  source 1..80: mol_type = other DNA

SEQ ID NO: 63656 - DNA, 80 bp, synthetic construct; identical to SEQ ID NO: 29173
  source 1..80: mol_type = other DNA

SEQ ID NO: 63657 - DNA, 80 bp, synthetic construct; identical to SEQ ID NO: 11195
  source 1..80: mol_type = other DNA

SEQ ID NO: 63658 - DNA, 80 bp, synthetic construct; identical to SEQ ID NO: 29175
  source 1..80: mol_type = other DNA

SEQ ID NO: 63659 - DNA, 80 bp, synthetic construct; identical to SEQ ID NO: 29176
  source 1..80: mol_type = other DNA

SEQ ID NO: 63660 - DNA, 80 bp, synthetic construct; identical to SEQ ID NO: 11196
  source 1..80: mol_type = other DNA

SEQ ID NO: 63661 - DNA, 80 bp, synthetic construct; identical to SEQ ID NO: 29178
  source 1..80: mol_type = other DNA

SEQ ID NO: 63662 - DNA, 80 bp, synthetic construct; identical to SEQ ID NO: 29179
  source 1..80: mol_type = other DNA

SEQ ID NO: 63663 - DNA, 80 bp, synthetic construct; identical to SEQ ID NO: 29180
  source 1..80: mol_type = other DNA

SEQ ID NO: 63664 - DNA, 80 bp, synthetic construct; identical to SEQ ID NO: 11197
  source 1..80: mol_type = other DNA

SEQ ID NO: 63665 - DNA, 80 bp, synthetic construct; identical to SEQ ID NO: 29182
  source 1..80: mol_type = other DNA

SEQ ID NO: 63666 - DNA, 80 bp, synthetic construct; identical to SEQ ID NO: 29183
  source 1..80: mol_type = other DNA

SEQ ID NO: 63667 - DNA, 80 bp, synthetic construct; identical to SEQ ID NO: 29184
  source 1..80: mol_type = other DNA

SEQ ID NO: 63668 - DNA, 80 bp, synthetic construct; identical to SEQ ID NO: 29185
  source 1..80: mol_type = other DNA

SEQ ID NO: 63669 - DNA, 80 bp, synthetic construct; identical to SEQ ID NO: 11198
  source 1..80: mol_type = other DNA

SEQ ID NO: 63670 - DNA, 80 bp, synthetic construct; identical to SEQ ID NO: 29187
  source 1..80: mol_type = other DNA

SEQ ID NO: 63671 - DNA, 80 bp, synthetic construct; identical to SEQ ID NO: 29188
  source 1..80: mol_type = other DNA

SEQ ID NO: 63672 - DNA, 80 bp, synthetic construct; identical to SEQ ID NO: 29189
  source 1..80: mol_type = other DNA

SEQ ID NO: 63673 - DNA, 80 bp, synthetic construct; identical to SEQ ID NO: 11199
  source 1..80: mol_type = other DNA

SEQ ID NO: 63674 - DNA, 80 bp, synthetic construct; identical to SEQ ID NO: 29191
  source 1..80: mol_type = other DNA

SEQ ID NO: 63675 - DNA, 80 bp, synthetic construct; identical to SEQ ID NO: 29192
  source 1..80: mol_type = other DNA

SEQ ID NO: 63676 - DNA, 80 bp, synthetic construct; identical to SEQ ID NO: 29193
  source 1..80: mol_type = other DNA

SEQ ID NO: 63677 - DNA, 80 bp, synthetic construct; identical to SEQ ID NO: 11200
  source 1..80: mol_type = other DNA

SEQ ID NO: 63678 - DNA, 80 bp, synthetic construct; identical to SEQ ID NO: 29195
  source 1..80: mol_type = other DNA

SEQ ID NO: 63679 - DNA, 80 bp, synthetic construct; identical to SEQ ID NO: 29196
  source 1..80: mol_type = other DNA

SEQ ID NO: 63680 - DNA, 80 bp, synthetic construct; identical to SEQ ID NO: 11201
  source 1..80: mol_type = other DNA

SEQ ID NO: 63681 - DNA, 80 bp, synthetic construct; identical to SEQ ID NO: 29198
  source 1..80: mol_type = other DNA

SEQ ID NO: 63682 - DNA, 80 bp, synthetic construct; identical to SEQ ID NO: 29199
  source 1..80: mol_type = other DNA

SEQ ID NO: 63683 - DNA, 80 bp, synthetic construct; identical to SEQ ID NO: 29200
  source 1..80: mol_type = other DNA

SEQ ID NO: 63684 - DNA, 80 bp, synthetic construct; identical to SEQ ID NO: 11202
  source 1..80: mol_type = other DNA

SEQ ID NO: 63685 - DNA, 80 bp, synthetic construct; identical to SEQ ID NO: 29202
  source 1..80: mol_type = other DNA

SEQ ID NO: 63686 - DNA, 80 bp, synthetic construct; identical to SEQ ID NO: 29203
  source 1..80: mol_type = other DNA

SEQ ID NO: 63687 - DNA, 80 bp, synthetic construct; identical to SEQ ID NO: 29205
  source 1..80: mol_type = other DNA

SEQ ID NO: 63688 - DNA, 80 bp, synthetic construct; identical to SEQ ID NO: 11203
  source 1..80: mol_type = other DNA

SEQ ID NO: 63689 - DNA, 80 bp, synthetic construct; identical to SEQ ID NO: 29207
  source 1..80: mol_type = other DNA

SEQ ID NO: 63690 - DNA, 80 bp, synthetic construct; identical to SEQ ID NO: 29208
  source 1..80: mol_type = other DNA

SEQ ID NO: 63691 - DNA, 80 bp, synthetic construct; identical to SEQ ID NO: 29210
  source 1..80: mol_type = other DNA

SEQ ID NO: 63692 - DNA, 80 bp, synthetic construct; identical to SEQ ID NO: 29211
  source 1..80: mol_type = other DNA

SEQ ID NO: 63693 - DNA, 80 bp, synthetic construct; identical to SEQ ID NO: 11205
  source 1..80: mol_type = other DNA

SEQ ID NO: 63694 - DNA, 80 bp, synthetic construct; identical to SEQ ID NO: 29214
  source 1..80: mol_type = other DNA

SEQ ID NO: 63695 - DNA, 80 bp, synthetic construct; identical to SEQ ID NO: 29215
  source 1..80: mol_type = other DNA

SEQ ID NO: 63696 - DNA, 80 bp, synthetic construct; identical to SEQ ID NO: 29216
  source 1..80: mol_type = other DNA

SEQ ID NO: 63697 - DNA, 80 bp, synthetic construct; identical to SEQ ID NO: 29218
  source 1..80: mol_type = other DNA

SEQ ID NO: 63698 - DNA, 80 bp, synthetic construct; identical to SEQ ID NO: 29219
  source 1..80: mol_type = other DNA

SEQ ID NO: 63699 - DNA, 80 bp, synthetic construct; identical to SEQ ID NO: 29220
  source 1..80: mol_type = other DNA

SEQ ID NO: 63700 - DNA, 80 bp, synthetic construct; identical to SEQ ID NO: 11207
  source 1..80: mol_type = other DNA

SEQ ID NO: 63701 - DNA, 80 bp, synthetic construct; identical to SEQ ID NO: 29223
  source 1..80: mol_type = other DNA

SEQ ID NO: 63702 - DNA, 80 bp, synthetic construct; identical to SEQ ID NO: 29224
  source 1..80: mol_type = other DNA

SEQ ID NO: 63703 - DNA, 80 bp, synthetic construct; identical to SEQ ID NO: 29225
  source 1..80: mol_type = other DNA

SEQ ID NO: 63704 - DNA, 80 bp, synthetic construct; identical to SEQ ID NO: 11208
  source 1..80: mol_type = other DNA

SEQ ID NO: 63705 - DNA, 80 bp, synthetic construct; identical to SEQ ID NO: 29227
  source 1..80: mol_type = other DNA

SEQ ID NO: 63706 - DNA, 80 bp, synthetic construct; identical to SEQ ID NO: 29228
  source 1..80: mol_type = other DNA

SEQ ID NO: 63707 - DNA, 80 bp, synthetic construct; identical to SEQ ID NO: 29229
  source 1..80: mol_type = other DNA

SEQ ID NO: 63708 - DNA, 80 bp, synthetic construct; identical to SEQ ID NO: 11209
  source 1..80: mol_type = other DNA

SEQ ID NO: 63709 - DNA, 80 bp, synthetic construct; identical to SEQ ID NO: 29231
  source 1..80: mol_type = other DNA

SEQ ID NO: 63710 - DNA, 80 bp, synthetic construct; identical to SEQ ID NO: 29232
  source 1..80: mol_type = other DNA

SEQ ID NO: 63711 - DNA, 80 bp, synthetic construct; identical to SEQ ID NO: 11210
  source 1..80: mol_type = other DNA

SEQ ID NO: 63712 - DNA, 80 bp, synthetic construct; identical to SEQ ID NO: 29235
  source 1..80: mol_type = other DNA

SEQ ID NO: 63713 - DNA, 80 bp, synthetic construct; identical to SEQ ID NO: 29236
  source 1..80: mol_type = other DNA

SEQ ID NO: 63714 - DNA, 80 bp, synthetic construct; identical to SEQ ID NO: 29237
  source 1..80: mol_type = other DNA

SEQ ID NO: 63715 - DNA, 80 bp, synthetic construct; identical to SEQ ID NO: 11211
  source 1..80: mol_type = other DNA

SEQ ID NO: 63716 - DNA, 80 bp, synthetic construct; identical to SEQ ID NO: 29239
  source 1..80: mol_type = other DNA

SEQ ID NO: 63717 - DNA, 80 bp, synthetic construct; identical to SEQ ID NO: 29240
  source 1..80: mol_type = other DNA

SEQ ID NO: 63718 - DNA, 80 bp, synthetic construct; identical to SEQ ID NO: 11212
  source 1..80: mol_type = other DNA

SEQ ID NO: 63719 - DNA, 80 bp, synthetic construct; identical to SEQ ID NO: 29243
  source 1..80: mol_type = other DNA

SEQ ID NO: 63720 - DNA, 80 bp, synthetic construct; identical to SEQ ID NO: 29244
  source 1..80: mol_type = other DNA

SEQ ID NO: 63721 - DNA, 80 bp, synthetic construct; identical to SEQ ID NO: 11213
  source 1..80: mol_type = other DNA

SEQ ID NO: 63722 - DNA, 80 bp, synthetic construct; identical to SEQ ID NO: 29246
  source 1..80: mol_type = other DNA

SEQ ID NO: 63723 - DNA, 80 bp, synthetic construct; identical to SEQ ID NO: 29247
  source 1..80: mol_type = other DNA

SEQ ID NO: 63724 - DNA, 80 bp, synthetic construct; identical to SEQ ID NO: 11214
  source 1..80: mol_type = other DNA

SEQ ID NO: 63725 - DNA, 80 bp, synthetic construct; identical to SEQ ID NO: 29251
  source 1..80: mol_type = other DNA

SEQ ID NO: 63726 - DNA, 80 bp, synthetic construct; identical to SEQ ID NO: 29252
  source 1..80: mol_type = other DNA

SEQ ID NO: 63727 - DNA, 80 bp, synthetic construct; identical to SEQ ID NO: 11215
  source 1..80: mol_type = other DNA

SEQ ID NO: 63728 - DNA, 80 bp, synthetic construct; identical to SEQ ID NO: 29255
  source 1..80: mol_type = other DNA

SEQ ID NO: 63729 - DNA, 80 bp, synthetic construct; identical to SEQ ID NO: 29256
  source 1..80: mol_type = other DNA

SEQ ID NO: 63730 - DNA, 80 bp, synthetic construct; identical to SEQ ID NO: 29257
  source 1..80: mol_type = other DNA

SEQ ID NO: 63731 - DNA, 80 bp, synthetic construct; identical to SEQ ID NO: 11216
  source 1..80: mol_type = other DNA

SEQ ID NO: 63732 - DNA, 80 bp, synthetic construct; identical to SEQ ID NO: 29259
  source 1..80: mol_type = other DNA

SEQ ID NO: 63733 - DNA, 80 bp, synthetic construct; identical to SEQ ID NO: 29260
  source 1..80: mol_type = other DNA

SEQ ID NO: 63734 - DNA, 80 bp, synthetic construct; identical to SEQ ID NO: 29261
  source 1..80: mol_type = other DNA

SEQ ID NO: 63735 - DNA, 80 bp, synthetic construct; identical to SEQ ID NO: 11217
  source 1..80: mol_type = other DNA

SEQ ID NO: 63736 - DNA, 80 bp, synthetic construct; identical to SEQ ID NO: 29263
  source 1..80: mol_type = other DNA

SEQ ID NO: 63737 - DNA, 80 bp, synthetic construct; identical to SEQ ID NO: 29264
  source 1..80: mol_type = other DNA

SEQ ID NO: 63738 - DNA, 80 bp, synthetic construct; identical to SEQ ID NO: 11218
  source 1..80: mol_type = other DNA

SEQ ID NO: 63739 - DNA, 80 bp, synthetic construct; identical to SEQ ID NO: 29267
  source 1..80: mol_type = other DNA

SEQ ID NO: 63740 - DNA, 80 bp, synthetic construct; identical to SEQ ID NO: 29268
  source 1..80: mol_type = other DNA

SEQ ID NO: 63741 - DNA, 80 bp, synthetic construct; identical to SEQ ID NO: 11219
  source 1..80: mol_type = other DNA

SEQ ID NO: 63742 - DNA, 80 bp, synthetic construct; identical to SEQ ID NO: 29270
  source 1..80: mol_type = other DNA

SEQ ID NO: 63743 - DNA, 80 bp, synthetic construct; identical to SEQ ID NO: 29271
  source 1..80: mol_type = other DNA

SEQ ID NO: 63744 - DNA, 80 bp, synthetic construct; identical to SEQ ID NO: 29272
  source 1..80: mol_type = other DNA

SEQ ID NO: 63745 - DNA, 80 bp, synthetic construct; identical to SEQ ID NO: 11220
  source 1..80: mol_type = other DNA

SEQ ID NO: 63746 - DNA, 80 bp, synthetic construct; identical to SEQ ID NO: 29274
  source 1..80: mol_type = other DNA

SEQ ID NO: 63747 - DNA, 80 bp, synthetic construct; identical to SEQ ID NO: 29275
  source 1..80: mol_type = other DNA

SEQ ID NO: 63748 - DNA, 80 bp, synthetic construct; identical to SEQ ID NO: 29276
  source 1..80: mol_type = other DNA

SEQ ID NO: 63749 - DNA, 80 bp, synthetic construct; identical to SEQ ID NO: 29277
  source 1..80: mol_type = other DNA

SEQ ID NO: 63750 - DNA, 80 bp, synthetic construct; identical to SEQ ID NO: 11221
  source 1..80: mol_type = other DNA

SEQ ID NO: 63751 - DNA, 80 bp, synthetic construct; identical to SEQ ID NO: 29279
  source 1..80: mol_type = other DNA

SEQ ID NO: 63752 - DNA, 80 bp, synthetic construct; identical to SEQ ID NO: 29280
  source 1..80: mol_type = other DNA

SEQ ID NO: 63753 - DNA, 80 bp, synthetic construct; identical to SEQ ID NO: 29282
  source 1..80: mol_type = other DNA

SEQ ID NO: 63754 - DNA, 80 bp, synthetic construct; identical to SEQ ID NO: 29283
  source 1..80: mol_type = other DNA

SEQ ID NO: 63755 - DNA, 80 bp, synthetic construct; identical to SEQ ID NO: 29284
  source 1..80: mol_type = other DNA

SEQ ID NO: 63756 - DNA, 80 bp, synthetic construct; identical to SEQ ID NO: 11223
  source 1..80: mol_type = other DNA

SEQ ID NO: 63757 - DNA, 80 bp, synthetic construct; identical to SEQ ID NO: 29286
  source 1..80: mol_type = other DNA

SEQ ID NO: 63758 - DNA, 80 bp, synthetic construct; identical to SEQ ID NO: 29287
  source 1..80: mol_type = other DNA

SEQ ID NO: 63759 - DNA, 80 bp, synthetic construct; identical to SEQ ID NO: 29289
  source 1..80: mol_type = other DNA

SEQ ID NO: 63760 - DNA, 80 bp, synthetic construct; identical to SEQ ID NO: 11224
  source 1..80: mol_type = other DNA

SEQ ID NO: 63761 - DNA, 80 bp, synthetic construct; identical to SEQ ID NO: 29291
  source 1..80: mol_type = other DNA

SEQ ID NO: 63762 - DNA, 80 bp, synthetic construct; identical to SEQ ID NO: 29292
  source 1..80: mol_type = other DNA

SEQ ID NO: 63763 - DNA, 80 bp, synthetic construct; identical to SEQ ID NO: 29293
  source 1..80: mol_type = other DNA

SEQ ID NO: 63764 - DNA, 80 bp, synthetic construct; identical to SEQ ID NO: 11225
  source 1..80: mol_type = other DNA

SEQ ID NO: 63765 - DNA, 80 bp, synthetic construct; identical to SEQ ID NO: 29295
  source 1..80: mol_type = other DNA

SEQ ID NO: 63766 - DNA, 80 bp, synthetic construct; identical to SEQ ID NO: 29296
  source 1..80: mol_type = other DNA

SEQ ID NO: 63767 - DNA, 80 bp, synthetic construct; identical to SEQ ID NO: 29297
  source 1..80: mol_type = other DNA

SEQ ID NO: 63768 - DNA, 80 bp, synthetic construct; identical to SEQ ID NO: 29298
  source 1..80: mol_type = other DNA

SEQ ID NO: 63769 - DNA, 80 bp, synthetic construct; identical to SEQ ID NO: 29299
  source 1..80: mol_type = other DNA

SEQ ID NO: 63770 - DNA, 80 bp, synthetic construct; identical to SEQ ID NO: 29300
  source 1..80: mol_type = other DNA

SEQ ID NO: 63771 - DNA, 80 bp, synthetic construct; identical to SEQ ID NO: 29301
  source 1..80: mol_type = other DNA

SEQ ID NO: 63772 - DNA, 80 bp, synthetic construct; identical to SEQ ID NO: 11226
  source 1..80: mol_type = other DNA

SEQ ID NO: 63773 - DNA, 80 bp, synthetic construct; identical to SEQ ID NO: 29303
  source 1..80: mol_type = other DNA

SEQ ID NO: 63774 - DNA, 80 bp, synthetic construct; identical to SEQ ID NO: 29304
  source 1..80: mol_type = other DNA

SEQ ID NO: 63775 - DNA, 80 bp, synthetic construct; identical to SEQ ID NO: 29305
  source 1..80: mol_type = other DNA

SEQ ID NO: 63776 - DNA, 80 bp, synthetic construct; identical to SEQ ID NO: 11227
  source 1..80: mol_type = other DNA

SEQ ID NO: 63777 - DNA, 80 bp, synthetic construct; identical to SEQ ID NO: 29307
  source 1..80: mol_type = other DNA

SEQ ID NO: 63778 - DNA, 80 bp, synthetic construct; identical to SEQ ID NO: 29308
  source 1..80: mol_type = other DNA

SEQ ID NO: 63779 - DNA, 80 bp, synthetic construct; identical to SEQ ID NO: 29309
  source 1..80: mol_type = other DNA

SEQ ID NO: 63780 - DNA, 80 bp, synthetic construct; identical to SEQ ID NO: 29310
  source 1..80: mol_type = other DNA

SEQ ID NO: 63781 - DNA, 80 bp, synthetic construct; identical to SEQ ID NO: 11228
  source 1..80: mol_type = other DNA

SEQ ID NO: 63782 - DNA, 80 bp, synthetic construct; identical to SEQ ID NO: 29312
  source 1..80: mol_type = other DNA

SEQ ID NO: 63783 - DNA, 80 bp, synthetic construct; identical to SEQ ID NO: 29313
  source 1..80: mol_type = other DNA

SEQ ID NO: 63784 - DNA, 80 bp, synthetic construct; identical to SEQ ID NO: 11229
  source 1..80: mol_type = other DNA

SEQ ID NO: 63785 - DNA, 80 bp, synthetic construct; identical to SEQ ID NO: 29315
  source 1..80: mol_type = other DNA

SEQ ID NO: 63786 - DNA, 80 bp, synthetic construct; identical to SEQ ID NO: 29316
  source 1..80: mol_type = other DNA

SEQ ID NO: 63787 - DNA, 80 bp, synthetic construct; identical to SEQ ID NO: 29317
  source 1..80: mol_type = other DNA

SEQ ID NO: 63788 - DNA, 80 bp, synthetic construct; identical to SEQ ID NO: 29318
  source 1..80: mol_type = other DNA

SEQ ID NO: 63789 - DNA, 80 bp, synthetic construct; identical to SEQ ID NO: 11230
  source 1..80: mol_type = other DNA

SEQ ID NO: 63790 - DNA, 80 bp, synthetic construct; identical to SEQ ID NO: 29320
  source 1..80: mol_type = other DNA

SEQ ID NO: 63791 - DNA, 80 bp, synthetic construct; identical to SEQ ID NO: 29321
  source 1..80: mol_type = other DNA

SEQ ID NO: 63792 - DNA, 80 bp, synthetic construct; identical to SEQ ID NO: 11231
  source 1..80: mol_type = other DNA

SEQ ID NO: 63793 - DNA, 80 bp, synthetic construct; identical to SEQ ID NO: 29323
  source 1..80: mol_type = other DNA

SEQ ID NO: 63794 - DNA, 80 bp, synthetic construct; identical to SEQ ID NO: 29324
  source 1..80: mol_type = other DNA

SEQ ID NO: 63795 - DNA, 80 bp, synthetic construct; identical to SEQ ID NO: 29325
  source 1..80: mol_type = other DNA

SEQ ID NO: 63796 - DNA, 80 bp, synthetic construct; identical to SEQ ID NO: 29326
  source 1..80: mol_type = other DNA

SEQ ID NO: 63797 - DNA, 80 bp, synthetic construct; identical to SEQ ID NO: 11232
  source 1..80: mol_type = other DNA

SEQ ID NO: 63798 - DNA, 80 bp, synthetic construct; identical to SEQ ID NO: 29328
  source 1..80: mol_type = other DNA

SEQ ID NO: 63799 - DNA, 80 bp, synthetic construct; identical to SEQ ID NO: 29329
  source 1..80: mol_type = other DNA

SEQ ID NO: 63800 - DNA, 80 bp, synthetic construct; identical to SEQ ID NO: 11233
  source 1..80: mol_type = other DNA

SEQ ID NO: 63801 - DNA, 80 bp, synthetic construct; identical to SEQ ID NO: 29331
  source 1..80: mol_type = other DNA

SEQ ID NO: 63802 - DNA, 80 bp, synthetic construct; identical to SEQ ID NO: 29332
  source 1..80: mol_type = other DNA

SEQ ID NO: 63803 - DNA, 80 bp, synthetic construct; identical to SEQ ID NO: 29333
  source 1..80: mol_type = other DNA

SEQ ID NO: 63804 - DNA, 80 bp, synthetic construct; identical to SEQ ID NO: 29334
  source 1..80: mol_type = other DNA

SEQ ID NO: 63805 - DNA, 80 bp, synthetic construct; identical to SEQ ID NO: 11234
  source 1..80: mol_type = other DNA

SEQ ID NO: 63806 - DNA, 80 bp, synthetic construct; identical to SEQ ID NO: 29336
  source 1..80: mol_type = other DNA

SEQ ID NO: 63807 - DNA, 80 bp, synthetic construct; identical to SEQ ID NO: 29337
  source 1..80: mol_type = other DNA

SEQ ID NO: 63808 - DNA, 80 bp, synthetic construct; identical to SEQ ID NO: 11235
  source 1..80: mol_type = other DNA

SEQ ID NO: 63809 - DNA, 80 bp, synthetic construct; identical to SEQ ID NO: 29339
  source 1..80: mol_type = other DNA

SEQ ID NO: 63810 - DNA, 80 bp, synthetic construct; identical to SEQ ID NO: 29340
  source 1..80: mol_type = other DNA

SEQ ID NO: 63811 - DNA, 80 bp, synthetic construct; identical to SEQ ID NO: 29341
  source 1..80: mol_type = other DNA

SEQ ID NO: 63812 - DNA, 80 bp, synthetic construct; identical to SEQ ID NO: 29342
  source 1..80: mol_type = other DNA

SEQ ID NO: 63813 - DNA, 80 bp, synthetic construct; identical to SEQ ID NO: 11236
  source 1..80: mol_type = other DNA

SEQ ID NO: 63814 - DNA, 80 bp, synthetic construct; identical to SEQ ID NO: 29344
  source 1..80: mol_type = other DNA

SEQ ID NO: 63815 - DNA, 80 bp, synthetic construct; identical to SEQ ID NO: 29345
  source 1..80: mol_type = other DNA

SEQ ID NO: 63816 - DNA, 80 bp, synthetic construct; identical to SEQ ID NO: 29346
  source 1..80: mol_type = other DNA

SEQ ID NO: 63817 - DNA, 80 bp, synthetic construct; identical to SEQ ID NO: 11237
  source 1..80: mol_type = other DNA

SEQ ID NO: 63818 - DNA, 80 bp, synthetic construct; identical to SEQ ID NO: 29348
  source 1..80: mol_type = other DNA

SEQ ID NO: 63819 - DNA, 80 bp, synthetic construct; identical to SEQ ID NO: 29349
  source 1..80: mol_type = other DNA

SEQ ID NO: 63820 - DNA, 80 bp, synthetic construct; identical to SEQ ID NO: 11238
  source 1..80: mol_type = other DNA

SEQ ID NO: 63821 - DNA, 80 bp, synthetic construct; identical to SEQ ID NO: 29351
  source 1..80: mol_type = other DNA

SEQ ID NO: 63822 - DNA, 80 bp, synthetic construct; identical to SEQ ID NO: 29352
  source 1..80: mol_type = other DNA

SEQ ID NO: 63823 - DNA, 80 bp, synthetic construct; identical to SEQ ID NO: 29353
  source 1..80: mol_type = other DNA

SEQ ID NO: 63824 - DNA, 80 bp, synthetic construct; identical to SEQ ID NO: 29354
  source 1..80: mol_type = other DNA

SEQ ID NO: 63825 - DNA, 80 bp, synthetic construct; identical to SEQ ID NO: 11239
  source 1..80: mol_type = other DNA

SEQ ID NO: 63826 - DNA, 80 bp, synthetic construct; identical to SEQ ID NO: 29356
  source 1..80: mol_type = other DNA

SEQ ID NO: 63827 - DNA, 80 bp, synthetic construct; identical to SEQ ID NO: 29357
  source 1..80: mol_type = other DNA

SEQ ID NO: 63828 - DNA, 80 bp, synthetic construct; identical to SEQ ID NO: 11240
  source 1..80: mol_type = other DNA

SEQ ID NO: 63829 - DNA, 80 bp, synthetic construct; identical to SEQ ID NO: 29359
  source 1..80: mol_type = other DNA

SEQ ID NO: 63830 - DNA, 80 bp, synthetic construct; identical to SEQ ID NO: 29360
  source 1..80: mol_type = other DNA

SEQ ID NO: 63831 - DNA, 80 bp, synthetic construct; identical to SEQ ID NO: 29361
  source 1..80: mol_type = other DNA

SEQ ID NO: 63832 - DNA, 80 bp, synthetic construct; identical to SEQ ID NO: 29362
  source 1..80: mol_type = other DNA

SEQ ID NO: 63833 - DNA, 80 bp, synthetic construct; identical to SEQ ID NO: 11241
  source 1..80: mol_type = other DNA

SEQ ID NO: 63834 - DNA, 80 bp, synthetic construct; identical to SEQ ID NO: 29364
  source 1..80: mol_type = other DNA

SEQ ID NO: 63835 - DNA, 80 bp, synthetic construct; identical to SEQ ID NO: 29365
  source 1..80: mol_type = other DNA

SEQ ID NO: 63836 - DNA, 80 bp, synthetic construct; identical to SEQ ID NO: 11242
  source 1..80: mol_type = other DNA

SEQ ID NO: 63837 - DNA, 80 bp, synthetic construct; identical to SEQ ID NO: 29367
  source 1..80: mol_type = other DNA

SEQ ID NO: 63838 - DNA, 80 bp, synthetic construct; identical to SEQ ID NO: 29368
  source 1..80: mol_type = other DNA

SEQ ID NO: 63839 - DNA, 80 bp, synthetic construct; identical to SEQ ID NO: 29369
  source 1..80: mol_type = other DNA

SEQ ID NO: 63840 - DNA, 80 bp, synthetic construct; identical to SEQ ID NO: 29370
  source 1..80: mol_type = other DNA

SEQ ID NO: 63841 - DNA, 80 bp, synthetic construct; identical to SEQ ID NO: 11243
  source 1..80: mol_type = other DNA

SEQ ID NO: 63842 - DNA, 80 bp, synthetic construct; identical to SEQ ID NO: 29372
  source 1..80: mol_type = other DNA

SEQ ID NO: 63843 - DNA, 80 bp, synthetic construct; identical to SEQ ID NO: 29373
  source 1..80: mol_type = other DNA

SEQ ID NO: 63844 - DNA, 80 bp, synthetic construct; identical to SEQ ID NO: 29374
  source 1..80: mol_type = other DNA

SEQ ID NO: 63845 - DNA, 80 bp, synthetic construct; identical to SEQ ID NO: 11244
  source 1..80: mol_type = other DNA

SEQ ID NO: 63846 - DNA, 80 bp, synthetic construct; identical to SEQ ID NO: 29376
  source 1..80: mol_type = other DNA

SEQ ID NO: 63847 - DNA, 80 bp, synthetic construct; identical to SEQ ID NO: 29377
  source 1..80: mol_type = other DNA

SEQ ID NO: 63848 - DNA, 80 bp, synthetic construct; identical to SEQ ID NO: 11245
  source 1..80: mol_type = other DNA

SEQ ID NO: 63849 - DNA, 80 bp, synthetic construct; identical to SEQ ID NO: 29379
  source 1..80: mol_type = other DNA

SEQ ID NO: 63850 - DNA, 80 bp, synthetic construct; identical to SEQ ID NO: 29380
  source 1..80: mol_type = other DNA

SEQ ID NO: 63851 - DNA, 80 bp, synthetic construct; identical to SEQ ID NO: 29381
  source 1..80: mol_type = other DNA

SEQ ID NO: 63852 - DNA, 80 bp, synthetic construct; identical to SEQ ID NO: 29382
  source 1..80: mol_type = other DNA

SEQ ID NO: 63853 - DNA, 80 bp, synthetic construct; identical to SEQ ID NO: 11246
  source 1..80: mol_type = other DNA

SEQ ID NO: 63854 - DNA, 80 bp, synthetic construct; identical to SEQ ID NO: 29384
  source 1..80: mol_type = other DNA

SEQ ID NO: 63855 - DNA, 80 bp, synthetic construct; identical to SEQ ID NO: 29385
  source 1..80: mol_type = other DNA

SEQ ID NO: 63856 - DNA, 80 bp, synthetic construct; identical to SEQ ID NO: 29386
  source 1..80: mol_type = other DNA

SEQ ID NO: 63857 - DNA, 80 bp, synthetic construct; identical to SEQ ID NO: 11247
  source 1..80: mol_type = other DNA

SEQ ID NO: 63858 - DNA, 80 bp, synthetic construct; identical to SEQ ID NO: 29388
  source 1..80: mol_type = other DNA

SEQ ID NO: 63859 - DNA, 80 bp, synthetic construct; identical to SEQ ID NO: 29389
  source 1..80: mol_type = other DNA

SEQ ID NO: 63860 - DNA, 80 bp, synthetic construct; identical to SEQ ID NO: 29390
  source 1..80: mol_type = other DNA

SEQ ID NO: 63861 - DNA, 80 bp, synthetic construct; identical to SEQ ID NO: 11248
  source 1..80: mol_type = other DNA

SEQ ID NO: 63862 - DNA, 80 bp, synthetic construct; identical to SEQ ID NO: 29392
  source 1..80: mol_type = other DNA

SEQ ID NO: 63863 - DNA, 80 bp, synthetic construct; identical to SEQ ID NO: 29393
  source 1..80: mol_type = other DNA

SEQ ID NO: 63864 - DNA, 80 bp, synthetic construct; identical to SEQ ID NO: 29394
  source 1..80: mol_type = other DNA

SEQ ID NO: 63865 - DNA, 80 bp, synthetic construct; identical to SEQ ID NO: 11249
  source 1..80: mol_type = other DNA

SEQ ID NO: 63866 - DNA, 80 bp, synthetic construct; identical to SEQ ID NO: 29396
  source 1..80: mol_type = other DNA

SEQ ID NO: 63867 - DNA, 80 bp, synthetic construct; identical to SEQ ID NO: 29397
  source 1..80: mol_type = other DNA

SEQ ID NO: 63868 - DNA, 80 bp, synthetic construct; identical to SEQ ID NO: 29398
  source 1..80: mol_type = other DNA

SEQ ID NO: 63869 - DNA, 80 bp, synthetic construct; identical to SEQ ID NO: 11250
  source 1..80: mol_type = other DNA

SEQ ID NO: 63870 - DNA, 80 bp, synthetic construct; identical to SEQ ID NO: 29400
  source 1..80: mol_type = other DNA

SEQ ID NO: 63871 - DNA, 80 bp, synthetic construct; identical to SEQ ID NO: 29401
  source 1..80: mol_type = other DNA

SEQ ID NO: 63872 - DNA, 80 bp, synthetic construct; identical to SEQ ID NO: 11251
  source 1..80: mol_type = other DNA

SEQ ID NO: 63873 - DNA, 80 bp, synthetic construct; identical to SEQ ID NO: 29403
  source 1..80: mol_type = other DNA

SEQ ID NO: 63874 - DNA, 80 bp, synthetic construct; identical to SEQ ID NO: 29404
  source 1..80: mol_type = other DNA

SEQ ID NO: 63875 - DNA, 80 bp, synthetic construct; identical to SEQ ID NO: 29405
  source 1..80: mol_type = other DNA

SEQ ID NO: 63876 - DNA, 80 bp, synthetic construct; identical to SEQ ID NO: 11252
  source 1..80: mol_type = other DNA

SEQ ID NO: 63877 - DNA, 80 bp, synthetic construct; identical to SEQ ID NO: 29407
  source 1..80: mol_type = other DNA

SEQ ID NO: 63878 - DNA, 80 bp, synthetic construct; identical to SEQ ID NO: 29408
  source 1..80: mol_type = other DNA

SEQ ID NO: 63879 - DNA, 80 bp, synthetic construct; identical to SEQ ID NO: 29409
  source 1..80: mol_type = other DNA

SEQ ID NO: 63880 - DNA, 80 bp, synthetic construct; identical to SEQ ID NO: 29410
  source 1..80: mol_type = other DNA

SEQ ID NO: 63881 - DNA, 80 bp, synthetic construct; identical to SEQ ID NO: 11253
  source 1..80: mol_type = other DNA

SEQ ID NO: 63882 - DNA, 80 bp, synthetic construct; identical to SEQ ID NO: 29412
  source 1..80: mol_type = other DNA

SEQ ID NO: 63883 - DNA, 80 bp, synthetic construct; identical to SEQ ID NO: 29413
  source 1..80: mol_type = other DNA

SEQ ID NO: 63884 - DNA, 80 bp, synthetic construct; identical to SEQ ID NO: 29414
  source 1..80: mol_type = other DNA

SEQ ID NO: 63885 - DNA, 80 bp, synthetic construct; identical to SEQ ID NO: 11254
  source 1..80: mol_type = other DNA

SEQ ID NO: 63886 - DNA, 80 bp, synthetic construct; identical to SEQ ID NO: 29416
  source 1..80: mol_type = other DNA

SEQ ID NO: 63887 - DNA, 80 bp, synthetic construct; identical to SEQ ID NO: 29417
  source 1..80: mol_type = other DNA

SEQ ID NO: 63888 - DNA, 80 bp, synthetic construct; identical to SEQ ID NO: 11255
  source 1..80: mol_type = other DNA

SEQ ID NO: 63889 - DNA, 80 bp, synthetic construct; identical to SEQ ID NO: 29420
  source 1..80: mol_type = other DNA

SEQ ID NO: 63890 - DNA, 80 bp, synthetic construct; identical to SEQ ID NO: 29421
  source 1..80: mol_type = other DNA

SEQ ID NO: 63891 - DNA, 80 bp, synthetic construct; identical to SEQ ID NO: 29422
  source 1..80: mol_type = other DNA

SEQ ID NO: 63892 - DNA, 80 bp, synthetic construct; identical to SEQ ID NO: 11256
  source 1..80: mol_type = other DNA

SEQ ID NO: 63893 - DNA, 80 bp, synthetic construct; identical to SEQ ID NO: 29424
  source 1..80: mol_type = other DNA

SEQ ID NO: 63894 - DNA, 80 bp, synthetic construct; identical to SEQ ID NO: 29426
  source 1..80: mol_type = other DNA

SEQ ID NO: 63895 - DNA, 80 bp, synthetic construct; identical to SEQ ID NO: 11257
  source 1..80: mol_type = other DNA

SEQ ID NO: 63896 - DNA, 80 bp, synthetic construct; identical to SEQ ID NO: 29428
  source 1..80: mol_type = other DNA

SEQ ID NO: 63897 - DNA, 80 bp, synthetic construct; identical to SEQ ID NO: 29429
  source 1..80: mol_type = other DNA

SEQ ID NO: 63898 - DNA, 80 bp, synthetic construct; identical to SEQ ID NO: 29430
  source 1..80: mol_type = other DNA

SEQ ID NO: 63899 - DNA, 80 bp, synthetic construct; identical to SEQ ID NO: 11258
  source 1..80: mol_type = other DNA

SEQ ID NO: 63900 - DNA, 80 bp, synthetic construct; identical to SEQ ID NO: 29432
  source 1..80: mol_type = other DNA

SEQ ID NO: 63901 - DNA, 80 bp, synthetic construct; identical to SEQ ID NO: 29433
  source 1..80: mol_type = other DNA

SEQ ID NO: 63902 - DNA, 80 bp, synthetic construct; identical to SEQ ID NO: 29434
  source 1..80: mol_type = other DNA

SEQ ID NO: 63903 - DNA, 80 bp, synthetic construct; identical to SEQ ID NO: 29435
  source 1..80: mol_type = other DNA

SEQ ID NO: 63904 - DNA, 80 bp, synthetic construct; identical to SEQ ID NO: 11259
  source 1..80: mol_type = other DNA

SEQ ID NO: 63905 - DNA, 80 bp, synthetic construct; identical to SEQ ID NO: 29437
  source 1..80: mol_type = other DNA

SEQ ID NO: 63906 - DNA, 80 bp, synthetic construct; identical to SEQ ID NO: 29438
  source 1..80: mol_type = other DNA

SEQ ID NO: 63907 - DNA, 80 bp, synthetic construct; identical to SEQ ID NO: 29439
  source 1..80: mol_type = other DNA

SEQ ID NO: 63908 - DNA, 80 bp, synthetic construct; identical to SEQ ID NO: 11260
  source 1..80: mol_type = other DNA

SEQ ID NO: 63909 - DNA, 80 bp, synthetic construct; identical to SEQ ID NO: 29441
  source 1..80: mol_type = other DNA

SEQ ID NO: 63910 - DNA, 80 bp, synthetic construct; identical to SEQ ID NO: 29442
  source 1..80: mol_type = other DNA

SEQ ID NO: 63911 - DNA, 80 bp, synthetic construct; identical to SEQ ID NO: 11261
  source 1..80: mol_type = other DNA

SEQ ID NO: 63912 - DNA, 80 bp, synthetic construct; identical to SEQ ID NO: 29444
  source 1..80: mol_type = other DNA

SEQ ID NO: 63913 - DNA, 80 bp, synthetic construct; identical to SEQ ID NO: 29446
  source 1..80: mol_type = other DNA

SEQ ID NO: 63914 - DNA, 80 bp, synthetic construct; identical to SEQ ID NO: 11262
  source 1..80: mol_type = other DNA

SEQ ID NO: 63915 - DNA, 80 bp, synthetic construct; identical to SEQ ID NO: 29448
  source 1..80: mol_type = other DNA

SEQ ID NO: 63916 - DNA, 80 bp, synthetic construct; identical to SEQ ID NO: 29449
  source 1..80: mol_type = other DNA

SEQ ID NO: 63917 - DNA, 80 bp, synthetic construct; identical to SEQ ID NO: 29450
  source 1..80: mol_type = other DNA

SEQ ID NO: 63918 - DNA, 80 bp, synthetic construct; identical to SEQ ID NO: 29451
  source 1..80: mol_type = other DNA

SEQ ID NO: 63919 - DNA, 80 bp, synthetic construct; identical to SEQ ID NO: 11263
  source 1..80: mol_type = other DNA

SEQ ID NO: 63920 - DNA, 80 bp, synthetic construct; identical to SEQ ID NO: 29453
  source 1..80: mol_type = other DNA

SEQ ID NO: 63921 - DNA, 80 bp, synthetic construct; identical to SEQ ID NO: 29454
  source 1..80: mol_type = other DNA

SEQ ID NO: 63922 - DNA, 80 bp, synthetic construct; identical to SEQ ID NO: 11264
  source 1..80: mol_type = other DNA

SEQ ID NO: 63923 - DNA, 80 bp, synthetic construct; identical to SEQ ID NO: 29456
  source 1..80: mol_type = other DNA

SEQ ID NO: 63924 - DNA, 80 bp, synthetic construct; identical to SEQ ID NO: 29457
  source 1..80: mol_type = other DNA

SEQ ID NO: 63925 - DNA, 80 bp, synthetic construct; identical to SEQ ID NO: 29458
  source 1..80: mol_type = other DNA

SEQ ID NO: 63926 - DNA, 80 bp, synthetic construct; identical to SEQ ID NO: 29459
  source 1..80: mol_type = other DNA

SEQ ID NO: 63927 - DNA, 80 bp, synthetic construct; identical to SEQ ID NO: 11265
  source 1..80: mol_type = other DNA

SEQ ID NO: 63928 - DNA, 80 bp, synthetic construct; identical to SEQ ID NO: 29461
  source 1..80: mol_type = other DNA

SEQ ID NO: 63929 - DNA, 80 bp, synthetic construct; identical to SEQ ID NO: 29462
  source 1..80: mol_type = other DNA

SEQ ID NO: 63930 - DNA, 80 bp, synthetic construct; identical to SEQ ID NO: 11266
  source 1..80: mol_type = other DNA

SEQ ID NO: 63931 - DNA, 80 bp, synthetic construct; identical to SEQ ID NO: 29464
  source 1..80: mol_type = other DNA

SEQ ID NO: 63932 - DNA, 80 bp, synthetic construct; identical to SEQ ID NO: 29465
  source 1..80: mol_type = other DNA

SEQ ID NO: 63933 - DNA, 80 bp, synthetic construct; identical to SEQ ID NO: 29466
  source 1..80: mol_type = other DNA

SEQ ID NO: 63934 - DNA, 80 bp, synthetic construct; identical to SEQ ID NO: 11267
  source 1..80: mol_type = other DNA

SEQ ID NO: 63935 - DNA, 80 bp, synthetic construct; identical to SEQ ID NO: 29468
  source 1..80: mol_type = other DNA

SEQ ID NO: 63936 - DNA, 80 bp, synthetic construct; identical to SEQ ID NO: 29469
  source 1..80: mol_type = other DNA

SEQ ID NO: 63937 - DNA, 80 bp, synthetic construct; identical to SEQ ID NO: 29470
  source 1..80: mol_type = other DNA

SEQ ID NO: 63938 - DNA, 80 bp, synthetic construct; identical to SEQ ID NO: 11268
  source 1..80: mol_type = other DNA

SEQ ID NO: 63939 - DNA, 80 bp, synthetic construct; identical to SEQ ID NO: 29473
  source 1..80: mol_type = other DNA

SEQ ID NO: 63940 - DNA, 80 bp, synthetic construct; identical to SEQ ID NO: 29474
  source 1..80: mol_type = other DNA

SEQ ID NO: 63941 - DNA, 80 bp, synthetic construct; identical to SEQ ID NO: 11269
  source 1..80: mol_type = other DNA

SEQ ID NO: 63942 - DNA, 80 bp, synthetic construct; identical to SEQ ID NO: 29476
  source 1..80: mol_type = other DNA

SEQ ID NO: 63943 - DNA, 80 bp, synthetic construct; identical to SEQ ID NO: 29477
  source 1..80: mol_type = other DNA

SEQ ID NO: 63944 - DNA, 80 bp, synthetic construct; identical to SEQ ID NO: 29478
  source 1..80: mol_type = other DNA

SEQ ID NO: 63945 - DNA, 80 bp, synthetic construct; identical to SEQ ID NO: 29479
  source 1..80: mol_type = other DNA

SEQ ID NO: 63946 - DNA, 80 bp, synthetic construct; identical to SEQ ID NO: 11270
  source 1..80: mol_type = other DNA

SEQ ID NO: 63947 - DNA, 80 bp, synthetic construct; identical to SEQ ID NO: 29482
  source 1..80: mol_type = other DNA

SEQ ID NO: 63948 - DNA, 80 bp, synthetic construct; identical to SEQ ID NO: 29484
  source 1..80: mol_type = other DNA

SEQ ID NO: 63949 - DNA, 80 bp, synthetic construct; identical to SEQ ID NO: 11271
  source 1..80: mol_type = other DNA

SEQ ID NO: 63950 - DNA, 80 bp, synthetic construct; identical to SEQ ID NO: 29486
  source 1..80: mol_type = other DNA

SEQ ID NO: 63951 - DNA, 80 bp, synthetic construct; identical to SEQ ID NO: 29487
  source 1..80: mol_type = other DNA

SEQ ID NO: 63952 - DNA, 80 bp, synthetic construct; identical to SEQ ID NO: 29488
  source 1..80: mol_type = other DNA

SEQ ID NO: 63953 - DNA, 80 bp, synthetic construct; identical to SEQ ID NO: 11272
  source 1..80: mol_type = other DNA

SEQ ID NO: 63954 - DNA, 80 bp, synthetic construct; identical to SEQ ID NO: 29490
  source 1..80: mol_type = other DNA

SEQ ID NO: 63955 - DNA, 80 bp, synthetic construct; identical to SEQ ID NO: 29491
  source 1..80: mol_type = other DNA

SEQ ID NO: 63956 - DNA, 80 bp, synthetic construct; identical to SEQ ID NO: 11273
  source 1..80: mol_type = other DNA

SEQ ID NO: 63957 - DNA, 80 bp, synthetic construct; identical to SEQ ID NO: 29494
  source 1..80: mol_type = other DNA

SEQ ID NO: 63958 - DNA, 80 bp, synthetic construct; identical to SEQ ID NO: 11274
  source 1..80: mol_type = other DNA

SEQ ID NO: 63959 - DNA, 80 bp, synthetic construct; identical to SEQ ID NO: 29497
  source 1..80: mol_type = other DNA

SEQ ID NO: 63960 - DNA, 80 bp, synthetic construct; identical to SEQ ID NO: 29498
  source 1..80: mol_type = other DNA

SEQ ID NO: 63961 - DNA, 80 bp, synthetic construct; identical to SEQ ID NO: 29499
  source 1..80: mol_type = other DNA

SEQ ID NO: 63962 - DNA, 80 bp, synthetic construct; identical to SEQ ID NO: 11275
  source 1..80: mol_type = other DNA

SEQ ID NO: 63963 - DNA, 80 bp, synthetic construct; identical to SEQ ID NO: 29501
  source 1..80: mol_type = other DNA

SEQ ID NO: 63964 - DNA, 80 bp, synthetic construct; identical to SEQ ID NO: 29502
  source 1..80: mol_type = other DNA

SEQ ID NO: 63965 - DNA, 80 bp, synthetic construct; identical to SEQ ID NO: 29503
  source 1..80: mol_type = other DNA

SEQ ID NO: 63966 - DNA, 80 bp, synthetic construct; identical to SEQ ID NO: 11276
  source 1..80: mol_type = other DNA

SEQ ID NO: 63967 - DNA, 80 bp, synthetic construct; identical to SEQ ID NO: 29505
  source 1..80: mol_type = other DNA

SEQ ID NO: 63968 - DNA, 80 bp, synthetic construct; identical to SEQ ID NO: 29506
  source 1..80: mol_type = other DNA

SEQ ID NO: 63969 - DNA, 80 bp, synthetic construct; identical to SEQ ID NO: 29507
  source 1..80: mol_type = other DNA

SEQ ID NO: 63970 - DNA, 80 bp, synthetic construct; identical to SEQ ID NO: 11277
  source 1..80: mol_type = other DNA

SEQ ID NO: 63971 - DNA, 80 bp, synthetic construct; identical to SEQ ID NO: 29509
  source 1..80: mol_type = other DNA

SEQ ID NO: 63972 - DNA, 80 bp, synthetic construct; identical to SEQ ID NO: 29510
  source 1..80: mol_type = other DNA

SEQ ID NO: 63973 - DNA, 80 bp, synthetic construct; identical to SEQ ID NO: 29511
  source 1..80: mol_type = other DNA

SEQ ID NO: 63974 - DNA, 80 bp, synthetic construct; identical to SEQ ID NO: 11278
  source 1..80: mol_type = other DNA

SEQ ID NO: 63975 - DNA, 80 bp, synthetic construct; identical to SEQ ID NO: 29513
  source 1..80: mol_type = other DNA

SEQ ID NO: 63976 - DNA, 80 bp, synthetic construct; identical to SEQ ID NO: 29514
  source 1..80: mol_type = other DNA

SEQ ID NO: 63977 - DNA, 80 bp, synthetic construct; identical to SEQ ID NO: 29515
  source 1..80: mol_type = other DNA

SEQ ID NO: 63978 - DNA, 80 bp, synthetic construct; identical to SEQ ID NO: 11279
  source 1..80: mol_type = other DNA

SEQ ID NO: 63979 - DNA, 80 bp, synthetic construct; identical to SEQ ID NO: 29517
  source 1..80: mol_type = other DNA

SEQ ID NO: 63980 - DNA, 80 bp, synthetic construct; identical to SEQ ID NO: 29518
  source 1..80: mol_type = other DNA

SEQ ID NO: 63981 - DNA, 80 bp, synthetic construct; identical to SEQ ID NO: 29519
  source 1..80: mol_type = other DNA

SEQ ID NO: 63982 - DNA, 80 bp, synthetic construct; identical to SEQ ID NO: 11280
  source 1..80: mol_type = other DNA

SEQ ID NO: 63983 - DNA, 80 bp, synthetic construct; identical to SEQ ID NO: 29522
  source 1..80: mol_type = other DNA

SEQ ID NO: 63984 - DNA, 80 bp, synthetic construct; identical to SEQ ID NO: 29523
  source 1..80: mol_type = other DNA

SEQ ID NO: 63985 - DNA, 80 bp, synthetic construct; identical to SEQ ID NO: 11281
  source 1..80: mol_type = other DNA

SEQ ID NO: 63986 - DNA, 80 bp, synthetic construct; identical to SEQ ID NO: 29525
  source 1..80: mol_type = other DNA

SEQ ID NO: 63987 - DNA, 80 bp, synthetic construct; identical to SEQ ID NO: 29526
  source 1..80: mol_type = other DNA

SEQ ID NO: 63988 - DNA, 80 bp, synthetic construct; identical to SEQ ID NO: 29527
  source 1..80: mol_type = other DNA

SEQ ID NO: 63989 - DNA, 80 bp, synthetic construct; identical to SEQ ID NO: 11282
  source 1..80: mol_type = other DNA

SEQ ID NO: 63990 - DNA, 80 bp, synthetic construct; identical to SEQ ID NO: 29529
  source 1..80: mol_type = other DNA

SEQ ID NO: 63991 - DNA, 80 bp, synthetic construct; identical to SEQ ID NO: 29531
  source 1..80: mol_type = other DNA

SEQ ID NO: 63992 - DNA, 80 bp, synthetic construct; identical to SEQ ID NO: 11283
  source 1..80: mol_type = other DNA

SEQ ID NO: 63993 - DNA, 80 bp, synthetic construct; identical to SEQ ID NO: 29534
  source 1..80: mol_type = other DNA

SEQ ID NO: 63994 - DNA, 80 bp, synthetic construct; identical to SEQ ID NO: 29535
  source 1..80: mol_type = other DNA

SEQ ID NO: 63995 - DNA, 80 bp, synthetic construct; identical to SEQ ID NO: 29537
  source 1..80: mol_type = other DNA

SEQ ID NO: 63996 - DNA, 80 bp, synthetic construct; identical to SEQ ID NO: 29539
  source 1..80: mol_type = other DNA

SEQ ID NO: 63997 - DNA, 80 bp, synthetic construct; identical to SEQ ID NO: 29541
  source 1..80: mol_type = other DNA

SEQ ID NO: 63998 - DNA, 80 bp, synthetic construct; identical to SEQ ID NO: 29543
  source 1..80: mol_type = other DNA

SEQ ID NO: 63999 - DNA, 80 bp, synthetic construct; identical to SEQ ID NO: 29544
  source 1..80: mol_type = other DNA

SEQ ID NO: 64000 - DNA, 80 bp, synthetic construct; identical to SEQ ID NO: 29546
  source 1..80: mol_type = other DNA

SEQ ID NO: 64001 - DNA, 80 bp, synthetic construct; identical to SEQ ID NO: 11286
  source 1..80: mol_type = other DNA

SEQ ID NO: 64002 - DNA, 80 bp, synthetic construct; identical to SEQ ID NO: 29548
  source 1..80: mol_type = other DNA

SEQ ID NO: 64003 - DNA, 80 bp, synthetic construct; identical to SEQ ID NO: 29549
  source 1..80: mol_type = other DNA

SEQ ID NO: 64004 - DNA, 80 bp, synthetic construct; identical to SEQ ID NO: 11287
  source 1..80: mol_type = other DNA

SEQ ID NO: 64005 - DNA, 80 bp, synthetic construct; identical to SEQ ID NO: 29551
  source 1..80: mol_type = other DNA

SEQ ID NO: 64006 - DNA, 80 bp, synthetic construct; identical to SEQ ID NO: 29552
  source 1..80: mol_type = other DNA

SEQ ID NO: 64007 - DNA, 80 bp, synthetic construct; identical to SEQ ID NO: 29553
  source 1..80: mol_type = other DNA

SEQ ID NO: 64008 - DNA, 80 bp, synthetic construct; identical to SEQ ID NO: 29554
  source 1..80: mol_type = other DNA

SEQ ID NO: 64009 - DNA, 80 bp, synthetic construct; identical to SEQ ID NO: 11288
  source 1..80: mol_type = other DNA

SEQ ID NO: 64010 - DNA, 80 bp, synthetic construct; identical to SEQ ID NO: 29556
  source 1..80: mol_type = other DNA

SEQ ID NO: 64011 - DNA, 80 bp, synthetic construct; identical to SEQ ID NO: 29557
  source 1..80: mol_type = other DNA

SEQ ID NO: 64012 - DNA, 80 bp, synthetic construct; identical to SEQ ID NO: 11289
  source 1..80: mol_type = other DNA

SEQ ID NO: 64013 - DNA, 80 bp, synthetic construct; identical to SEQ ID NO: 29559
  source 1..80: mol_type = other DNA

SEQ ID NO: 64014 - DNA, 80 bp, synthetic construct; identical to SEQ ID NO: 29560
  source 1..80: mol_type = other DNA

SEQ ID NO: 64015 - DNA, 80 bp, synthetic construct; identical to SEQ ID NO: 29561
  source 1..80: mol_type = other DNA

SEQ ID NO: 64016 - DNA, 80 bp, synthetic construct; identical to SEQ ID NO: 11290
  source 1..80: mol_type = other DNA

SEQ ID NO: 64017 - DNA, 80 bp, synthetic construct; identical to SEQ ID NO: 29563
  source 1..80: mol_type = other DNA

SEQ ID NO: 64018 - DNA, 80 bp, synthetic construct; identical to SEQ ID NO: 29564
  source 1..80: mol_type = other DNA

SEQ ID NO: 64019 - DNA, 80 bp, synthetic construct; identical to SEQ ID NO: 29565
  source 1..80: mol_type = other DNA

SEQ ID NO: 64020 - DNA, 80 bp, synthetic construct; identical to SEQ ID NO: 29566
  source 1..80: mol_type = other DNA

SEQ ID NO: 64021 - DNA, 80 bp, synthetic construct; identical to SEQ ID NO: 11291
  source 1..80: mol_type = other DNA

SEQ ID NO: 64022 - DNA, 80 bp, synthetic construct; identical to SEQ ID NO: 29568
  source 1..80: mol_type = other DNA

SEQ ID NO: 64023 - DNA, 80 bp, synthetic construct; identical to SEQ ID NO: 29569
  source 1..80: mol_type = other DNA

SEQ ID NO: 64024 - DNA, 80 bp, synthetic construct; identical to SEQ ID NO: 11292
  source 1..80: mol_type = other DNA

SEQ ID NO: 64025 - DNA, 80 bp, synthetic construct; identical to SEQ ID NO: 29571
  source 1..80: mol_type = other DNA

SEQ ID NO: 64026 - DNA, 80 bp, synthetic construct; identical to SEQ ID NO: 29572
  source 1..80: mol_type = other DNA

SEQ ID NO: 64027 - DNA, 80 bp, synthetic construct; identical to SEQ ID NO: 29574
  source 1..80: mol_type = other DNA

SEQ ID NO: 64028 - DNA, 80 bp, synthetic construct; identical to SEQ ID NO: 11293
  source 1..80: mol_type = other DNA

SEQ ID NO: 64029 - DNA, 80 bp, synthetic construct; identical to SEQ ID NO: 29576
  source 1..80: mol_type = other DNA

SEQ ID NO: 64030 - DNA, 80 bp, synthetic construct; identical to SEQ ID NO: 29577
  source 1..80: mol_type = other DNA

SEQ ID NO: 64031 - DNA, 80 bp, synthetic construct; identical to SEQ ID NO: 11294
  source 1..80: mol_type = other DNA

SEQ ID NO: 64032 - DNA, 80 bp, synthetic construct; identical to SEQ ID NO: 29579
  source 1..80: mol_type = other DNA

SEQ ID NO: 64033 - DNA, 80 bp, synthetic construct; identical to SEQ ID NO: 29580
  source 1..80: mol_type = other DNA

SEQ ID NO: 64034 - DNA, 80 bp, synthetic construct; identical to SEQ ID NO: 29581
  source 1..80: mol_type = other DNA

SEQ ID NO: 64035 - DNA, 80 bp, synthetic construct; identical to SEQ ID NO: 29582
  source 1..80: mol_type = other DNA

SEQ ID NO: 64036 - DNA, 80 bp, synthetic construct; identical to SEQ ID NO: 11295
  source 1..80: mol_type = other DNA

SEQ ID NO: 64037 - DNA, 80 bp, synthetic construct; identical to SEQ ID NO: 29584
  source 1..80: mol_type = other DNA

SEQ ID NO: 64038 - DNA, 80 bp, synthetic construct; identical to SEQ ID NO: 29585
  source 1..80: mol_type = other DNA

SEQ ID NO: 64039 - DNA, 80 bp, synthetic construct; identical to SEQ ID NO: 29586
  source 1..80: mol_type = other DNA

SEQ ID NO: 64040 - DNA, 80 bp, synthetic construct; identical to SEQ ID NO: 11296
  source 1..80: mol_type = other DNA

SEQ ID NO: 64041 - DNA, 80 bp, synthetic construct; identical to SEQ ID NO: 29588
  source 1..80: mol_type = other DNA

SEQ ID NO: 64042 - DNA, 80 bp, synthetic construct; identical to SEQ ID NO: 29589
  source 1..80: mol_type = other DNA

SEQ ID NO: 64043 - DNA, 80 bp, synthetic construct; identical to SEQ ID NO: 11297
  source 1..80: mol_type = other DNA

SEQ ID NO: 64044 - DNA, 80 bp, synthetic construct; identical to SEQ ID NO: 29591
  source 1..80: mol_type = other DNA

SEQ ID NO: 64045 - DNA, 80 bp, synthetic construct; identical to SEQ ID NO: 29592
  source 1..80: mol_type = other DNA

SEQ ID NO: 64046 - DNA, 80 bp, synthetic construct; identical to SEQ ID NO: 29593
  source 1..80: mol_type = other DNA

SEQ ID NO: 64047 - DNA, 80 bp, synthetic construct; identical to SEQ ID NO: 11298
  source 1..80: mol_type = other DNA

SEQ ID NO: 64048 - DNA, 80 bp, synthetic construct; identical to SEQ ID NO: 29595
  source 1..80: mol_type = other DNA

SEQ ID NO: 64049 - DNA, 80 bp, synthetic construct; identical to SEQ ID NO: 29596
  source 1..80: mol_type = other DNA

SEQ ID NO: 64050 - DNA, 80 bp, synthetic construct; identical to SEQ ID NO: 29597
  source 1..80: mol_type = other DNA

SEQ ID NO: 64051 - DNA, 80 bp, synthetic construct; identical to SEQ ID NO: 11299
  source 1..80: mol_type = other DNA

SEQ ID NO: 64052 - DNA, 80 bp, synthetic construct; identical to SEQ ID NO: 29599
  source 1..80: mol_type = other DNA

SEQ ID NO: 64053 - DNA, 80 bp, synthetic construct; identical to SEQ ID NO: 29600
  source 1..80: mol_type = other DNA

SEQ ID NO: 64054 - DNA, 80 bp, synthetic construct; identical to SEQ ID NO: 29601
  source 1..80: mol_type = other DNA

SEQ ID NO: 64055 - DNA, 80 bp, synthetic construct; identical to SEQ ID NO: 11300
  source 1..80: mol_type = other DNA

SEQ ID NO: 64056 - DNA, 80 bp, synthetic construct; identical to SEQ ID NO: 29603
  source 1..80: mol_type = other DNA

SEQ ID NO: 64057 - DNA, 80 bp, synthetic construct; identical to SEQ ID NO: 29605
  source 1..80: mol_type = other DNA

SEQ ID NO: 64058 - DNA, 80 bp, synthetic construct; identical to SEQ ID NO: 29606
  source 1..80: mol_type = other DNA

SEQ ID NO: 64059 - DNA, 80 bp, synthetic construct; identical to SEQ ID NO: 11301
  source 1..80: mol_type = other DNA

SEQ ID NO: 64060 - DNA, 80 bp, synthetic construct; identical to SEQ ID NO: 29608
  source 1..80: mol_type = other DNA

SEQ ID NO: 64061 - DNA, 80 bp, synthetic construct; identical to SEQ ID NO: 29609
  source 1..80: mol_type = other DNA

SEQ ID NO: 64062 - DNA, 80 bp, synthetic construct; identical to SEQ ID NO: 11302
  source 1..80: mol_type = other DNA

SEQ ID NO: 64063 - DNA, 80 bp, synthetic construct; identical to SEQ ID NO: 29611
  source 1..80: mol_type = other DNA

SEQ ID NO: 64064 - DNA, 80 bp, synthetic construct; identical to SEQ ID NO: 29612
  source 1..80: mol_type = other DNA

SEQ ID NO: 64065 - DNA, 80 bp, synthetic construct; identical to SEQ ID NO: 29613
  source 1..80: mol_type = other DNA

SEQ ID NO: 64066 - DNA, 80 bp, synthetic construct; identical to SEQ ID NO: 29614
  source 1..80: mol_type = other DNA

SEQ ID NO: 64067 - DNA, 80 bp, synthetic construct; identical to SEQ ID NO: 11303
  source 1..80: mol_type = other DNA

SEQ ID NO: 64068 - DNA, 80 bp, synthetic construct; identical to SEQ ID NO: 29616
  source 1..80: mol_type = other DNA

SEQ ID NO: 64069 - DNA, 80 bp, synthetic construct; identical to SEQ ID NO: 29617
  source 1..80: mol_type = other DNA

SEQ ID NO: 64070 - DNA, 80 bp, synthetic construct; identical to SEQ ID NO: 11304
  source 1..80: mol_type = other DNA

SEQ ID NO: 64071 - DNA, 80 bp, synthetic construct; identical to SEQ ID NO: 29619
  source 1..80: mol_type = other DNA

SEQ ID NO: 64072 - DNA, 80 bp, synthetic construct; identical to SEQ ID NO: 29620
  source 1..80: mol_type = other DNA

SEQ ID NO: 64073 - DNA, 80 bp, synthetic construct; identical to SEQ ID NO: 29622
  source 1..80: mol_type = other DNA

SEQ ID NO: 64074 - DNA, 80 bp, synthetic construct; identical to SEQ ID NO: 11305
  source 1..80: mol_type = other DNA

SEQ ID NO: 64075 - DNA, 80 bp, synthetic construct; identical to SEQ ID NO: 29624
  source 1..80: mol_type = other DNA

SEQ ID NO: 64076 - DNA, 80 bp, synthetic construct; identical to SEQ ID NO: 29625
  source 1..80: mol_type = other DNA

SEQ ID NO: 64077 - DNA, 80 bp, synthetic construct; identical to SEQ ID NO: 29626
  source 1..80: mol_type = other DNA

SEQ ID NO: 64078 - DNA, 80 bp, synthetic construct; identical to SEQ ID NO: 29627
  source 1..80: mol_type = other DNA

SEQ ID NO: 64079 - DNA, 80 bp, synthetic construct; identical to SEQ ID NO: 11306
  source 1..80: mol_type = other DNA

SEQ ID NO: 64080 - DNA, 80 bp, synthetic construct; identical to SEQ ID NO: 29629
  source 1..80: mol_type = other DNA

SEQ ID NO: 64081 - DNA, 80 bp, synthetic construct; identical to SEQ ID NO: 29630
  source 1..80: mol_type = other DNA

SEQ ID NO: 64082 - DNA, 80 bp, synthetic construct; identical to SEQ ID NO: 11307
  source 1..80: mol_type = other DNA

SEQ ID NO: 64083 - DNA, 80 bp, synthetic construct; identical to SEQ ID NO: 29632
  source 1..80: mol_type = other DNA

SEQ ID NO: 64084 - DNA, 80 bp, synthetic construct; identical to SEQ ID NO: 29633
  source 1..80: mol_type = other DNA

SEQ ID NO: 64085 - DNA, 80 bp, synthetic construct; identical to SEQ ID NO: 29634
  source 1..80: mol_type = other DNA

SEQ ID NO: 64086 - DNA, 80 bp, synthetic construct; identical to SEQ ID NO: 29635
  source 1..80: mol_type = other DNA

SEQ ID NO: 64087 - DNA, 80 bp, synthetic construct; identical to SEQ ID NO: 11308
  source 1..80: mol_type = other DNA

SEQ ID NO: 64088 - DNA, 80 bp, synthetic construct; identical to SEQ ID NO: 29637
  source 1..80: mol_type = other DNA

SEQ ID NO: 64089 - DNA, 80 bp, synthetic construct; identical to SEQ ID NO: 29638
  source 1..80: mol_type = other DNA

SEQ ID NO: 64090 - DNA, 80 bp, synthetic construct; identical to SEQ ID NO: 11309
  source 1..80: mol_type = other DNA

SEQ ID NO: 64091 - DNA, 80 bp, synthetic construct; identical to SEQ ID NO: 29640
  source 1..80: mol_type = other DNA

SEQ ID NO: 64092 - DNA, 80 bp, synthetic construct; identical to SEQ ID NO: 29641
  source 1..80: mol_type = other DNA

SEQ ID NO: 64093 - DNA, 80 bp, synthetic construct; identical to SEQ ID NO: 29642
  source 1..80: mol_type = other DNA

SEQ ID NO: 64094 - DNA, 80 bp, synthetic construct; identical to SEQ ID NO: 29643
  source 1..80: mol_type = other DNA

SEQ ID NO: 64095 - DNA, 80 bp, synthetic construct; identical to SEQ ID NO: 11310
  source 1..80: mol_type = other DNA

SEQ ID NO: 64096 - DNA, 80 bp, synthetic construct; identical to SEQ ID NO: 29645
  source 1..80: mol_type = other DNA

SEQ ID NO: 64097 - DNA, 80 bp, synthetic construct; identical to SEQ ID NO: 29646
  source 1..80: mol_type = other DNA

SEQ ID NO: 64098 - DNA, 80 bp, synthetic construct; identical to SEQ ID NO: 29647
  source 1..80: mol_type = other DNA

SEQ ID NO: 64099 - DNA, 80 bp, synthetic construct; identical to SEQ ID NO: 11311
  source 1..80: mol_type = other DNA

SEQ ID NO: 64100 - DNA, 80 bp, synthetic construct; identical to SEQ ID NO: 29649
  source 1..80: mol_type = other DNA

SEQ ID NO: 64101 - DNA, 80 bp, synthetic construct; identical to SEQ ID NO: 29650
  source 1..80: mol_type = other DNA

SEQ ID NO: 64102 - DNA, 80 bp, synthetic construct; identical to SEQ ID NO: 29651
  source 1..80: mol_type = other DNA

SEQ ID NO: 64103 - DNA, 80 bp, synthetic construct; identical to SEQ ID NO: 29652
  source 1..80: mol_type = other DNA

SEQ ID NO: 64104 - DNA, 80 bp, synthetic construct; identical to SEQ ID NO: 11312
  source 1..80: mol_type = other DNA

SEQ ID NO: 64105 - DNA, 80 bp, synthetic construct; identical to SEQ ID NO: 29654
  source 1..80: mol_type = other DNA

SEQ ID NO: 64106 - DNA, 80 bp, synthetic construct; identical to SEQ ID NO: 11313
  source 1..80: mol_type = other DNA

SEQ ID NO: 64107 - DNA, 80 bp, synthetic construct; identical to SEQ ID NO: 29656
  source 1..80: mol_type = other DNA

SEQ ID NO: 64108 - DNA, 80 bp, synthetic construct; identical to SEQ ID NO: 29657
  source 1..80: mol_type = other DNA

SEQ ID NO: 64109 - DNA, 80 bp, synthetic construct; identical to SEQ ID NO: 29658
  source 1..80: mol_type = other DNA

SEQ ID NO: 64110 - DNA, 80 bp, synthetic construct; identical to SEQ ID NO: 11314
  source 1..80: mol_type = other DNA

SEQ ID NO: 64111 - DNA, 80 bp, synthetic construct; identical to SEQ ID NO: 29660
  source 1..80: mol_type = other DNA

SEQ ID NO: 64112 - DNA, 80 bp, synthetic construct; identical to SEQ ID NO: 29661
  source 1..80: mol_type = other DNA

SEQ ID NO: 64113 - DNA, 80 bp, synthetic construct; identical to SEQ ID NO: 29662
  source 1..80: mol_type = other DNA

SEQ ID NO: 64114 - DNA, 80 bp, synthetic construct; identical to SEQ ID NO: 11315
  source 1..80: mol_type = other DNA

SEQ ID NO: 64115 - DNA, 80 bp, synthetic construct; identical to SEQ ID NO: 29665
  source 1..80: mol_type = other DNA

SEQ ID NO: 64116 - DNA, 80 bp, synthetic construct; identical to SEQ ID NO: 11316
  source 1..80: mol_type = other DNA

SEQ ID NO: 64117 - DNA, 80 bp, synthetic construct; identical to SEQ ID NO: 29668
  source 1..80: mol_type = other DNA

SEQ ID NO: 64118 - DNA, 80 bp, synthetic construct; identical to SEQ ID NO: 29669
  source 1..80: mol_type = other DNA

SEQ ID NO: 64119 - DNA, 80 bp, synthetic construct; identical to SEQ ID NO: 29670
  source 1..80: mol_type = other DNA

SEQ ID NO: 64120 - DNA, 80 bp, synthetic construct; identical to SEQ ID NO: 29671
  source 1..80: mol_type = other DNA

SEQ ID NO: 64121 - DNA, 80 bp, synthetic construct; identical to SEQ ID NO: 11317
  source 1..80: mol_type = other DNA

SEQ ID NO: 64122 - DNA, 80 bp, synthetic construct; identical to SEQ ID NO: 29673
  source 1..80: mol_type = other DNA

SEQ ID NO: 64123 - DNA, 80 bp, synthetic construct; identical to SEQ ID NO: 29675
  source 1..80: mol_type = other DNA

SEQ ID NO: 64124 - DNA, 80 bp, synthetic construct; identical to SEQ ID NO: 11318
  source 1..80: mol_type = other DNA

SEQ ID NO: 64125 - DNA, 80 bp, synthetic construct; identical to SEQ ID NO: 29677
  source 1..80: mol_type = other DNA

SEQ ID NO: 64126 - DNA, 80 bp, synthetic construct; identical to SEQ ID NO: 29678
  source 1..80: mol_type = other DNA

SEQ ID NO: 64127 - DNA, 80 bp, synthetic construct; identical to SEQ ID NO: 11319
  source 1..80: mol_type = other DNA

SEQ ID NO: 64128 - DNA, 80 bp, synthetic construct; identical to SEQ ID NO: 29680
  source 1..80: mol_type = other DNA

SEQ ID NO: 64129 - DNA, 80 bp, synthetic construct; identical to SEQ ID NO: 29681
  source 1..80: mol_type = other DNA

SEQ ID NO: 64130 - DNA, 80 bp, synthetic construct; identical to SEQ ID NO: 29682
  source 1..80: mol_type = other DNA

SEQ ID NO: 64131 - DNA, 80 bp, synthetic construct; identical to SEQ ID NO: 29683
  source 1..80: mol_type = other DNA

SEQ ID NO: 64132 - DNA, 80 bp, synthetic construct; identical to SEQ ID NO: 11320
  source 1..80: mol_type = other DNA

SEQ ID NO: 64133 - DNA, 80 bp, synthetic construct; identical to SEQ ID NO: 29685
  source 1..80: mol_type = other DNA

SEQ ID NO: 64134 - DNA, 80 bp, synthetic construct; identical to SEQ ID NO: 29686
  source 1..80: mol_type = other DNA

SEQ ID NO: 64135 - DNA, 80 bp, synthetic construct; identical to SEQ ID NO: 11321
  source 1..80: mol_type = other DNA

SEQ ID NO: 64136 - DNA, 80 bp, synthetic construct; identical to SEQ ID NO: 29688
  source 1..80: mol_type = other DNA

SEQ ID NO: 64137 - DNA, 80 bp, synthetic construct; identical to SEQ ID NO: 29689
  source 1..80: mol_type = other DNA

SEQ ID NO: 64138 - DNA, 80 bp, synthetic construct; identical to SEQ ID NO: 29690
  source 1..80: mol_type = other DNA

SEQ ID NO: 64139 - DNA, 80 bp, synthetic construct; identical to SEQ ID NO: 29691
  source 1..80: mol_type = other DNA

SEQ ID NO: 64140 - DNA, 80 bp, synthetic construct; identical to SEQ ID NO: 11322
  source 1..80: mol_type = other DNA

SEQ ID NO: 64141 - DNA, 80 bp, synthetic construct; identical to SEQ ID NO: 29693
  source 1..80: mol_type = other DNA

SEQ ID NO: 64142 - DNA, 80 bp, synthetic construct; identical to SEQ ID NO: 29694
  source 1..80: mol_type = other DNA

SEQ ID NO: 64143 - DNA, 80 bp, synthetic construct; identical to SEQ ID NO: 29695
  source 1..80: mol_type = other DNA

SEQ ID NO: 64144 - DNA, 80 bp, synthetic construct; identical to SEQ ID NO: 11323
  source 1..80: mol_type = other DNA

SEQ ID NO: 64145 - DNA, 80 bp, synthetic construct; identical to SEQ ID NO: 29697
  source 1..80: mol_type = other DNA

SEQ ID NO: 64146 - DNA, 80 bp, synthetic construct; identical to SEQ ID NO: 29698
  source 1..80: mol_type = other DNA

SEQ ID NO: 64147 - DNA, 80 bp, synthetic construct; identical to SEQ ID NO: 29699
  source 1..80: mol_type = other DNA

SEQ ID NO: 64148 - DNA, 80 bp, synthetic construct; identical to SEQ ID NO: 11324
  source 1..80: mol_type = other DNA

SEQ ID NO: 64149 - DNA, 80 bp, synthetic construct; identical to SEQ ID NO: 29701
  source 1..80: mol_type = other DNA

SEQ ID NO: 64150 - DNA, 80 bp, synthetic construct; identical to SEQ ID NO: 29702
  source 1..80: mol_type = other DNA

SEQ ID NO: 64151 - DNA, 80 bp, synthetic construct; identical to SEQ ID NO: 11325
  source 1..80: mol_type = other DNA

SEQ ID NO: 64152 - DNA, 80 bp, synthetic construct; identical to SEQ ID NO: 29704
  source 1..80: mol_type = other DNA

SEQ ID NO: 64153 - DNA, 80 bp, synthetic construct; identical to SEQ ID NO: 29705
  source 1..80: mol_type = other DNA

SEQ ID NO: 64154 - DNA, 80 bp, synthetic construct; identical to SEQ ID NO: 29706
  source 1..80: mol_type = other DNA

SEQ ID NO: 64155 - DNA, 80 bp, synthetic construct; identical to SEQ ID NO: 11326
  source 1..80: mol_type = other DNA

SEQ ID NO: 64156 - DNA, 80 bp, synthetic construct; identical to SEQ ID NO: 29708
  source 1..80: mol_type = other DNA

SEQ ID NO: 64157 - DNA, 80 bp, synthetic construct; identical to SEQ ID NO: 29709
  source 1..80: mol_type = other DNA

SEQ ID NO: 64158 - DNA, 80 bp, synthetic construct; identical to SEQ ID NO: 29710
  source 1..80: mol_type = other DNA

SEQ ID NO: 64159 - DNA, 80 bp, synthetic construct; identical to SEQ ID NO: 11327
  source 1..80: mol_type = other DNA

SEQ ID NO: 64160 - DNA, 80 bp, synthetic construct; identical to SEQ ID NO: 29712
  source 1..80: mol_type = other DNA

SEQ ID NO: 64161 - DNA, 80 bp, synthetic construct; identical to SEQ ID NO: 29713
  source 1..80: mol_type = other DNA

SEQ ID NO: 64162 - DNA, 80 bp, synthetic construct; identical to SEQ ID NO: 29714
  source 1..80: mol_type = other DNA

SEQ ID NO: 64163 - DNA, 80 bp, synthetic construct; identical to SEQ ID NO: 11328
  source 1..80: mol_type = other DNA

SEQ ID NO: 64164 - DNA, 80 bp, synthetic construct; identical to SEQ ID NO: 29716
  source 1..80: mol_type = other DNA

SEQ ID NO: 64165 - DNA, 80 bp, synthetic construct; identical to SEQ ID NO: 29717
  source 1..80: mol_type = other DNA

SEQ ID NO: 64166 - DNA, 80 bp, synthetic construct; identical to SEQ ID NO: 29718
  source 1..80: mol_type = other DNA

SEQ ID NO: 64167 - DNA, 80 bp, synthetic construct; identical to SEQ ID NO: 11329
  source 1..80: mol_type = other DNA

SEQ ID NO: 64168 - DNA, 80 bp, synthetic construct; identical to SEQ ID NO: 29720
  source 1..80: mol_type = other DNA

SEQ ID NO: 64169 - DNA, 80 bp, synthetic construct; identical to SEQ ID NO: 29721
  source 1..80: mol_type = other DNA

SEQ ID NO: 64170 - DNA, 80 bp, synthetic construct; identical to SEQ ID NO: 29722
  source 1..80: mol_type = other DNA

SEQ ID NO: 64171 - DNA, 80 bp, synthetic construct; identical to SEQ ID NO: 29723
  source 1..80: mol_type = other DNA

SEQ ID NO: 64172 - DNA, 80 bp, synthetic construct; identical to SEQ ID NO: 11330
  source 1..80: mol_type = other DNA

SEQ ID NO: 64173 - DNA, 80 bp, synthetic construct; identical to SEQ ID NO: 29725
  source 1..80: mol_type = other DNA

SEQ ID NO: 64174 - DNA, 80 bp, synthetic construct; identical to SEQ ID NO: 29726
  source 1..80: mol_type = other DNA

SEQ ID NO: 64175 - DNA, 80 bp, synthetic construct; identical to SEQ ID NO: 11331
  source 1..80: mol_type = other DNA

SEQ ID NO: 64176 - DNA, 80 bp, synthetic construct; identical to SEQ ID NO: 29728
  source 1..80: mol_type = other DNA

SEQ ID NO: 64177 - DNA, 80 bp, synthetic construct; identical to SEQ ID NO: 29729
  source 1..80: mol_type = other DNA

SEQ ID NO: 64178 - DNA, 80 bp, synthetic construct; identical to SEQ ID NO: 29730
  source 1..80: mol_type = other DNA

SEQ ID NO: 64179 - DNA, 80 bp, synthetic construct; identical to SEQ ID NO: 11332
  source 1..80: mol_type = other DNA

SEQ ID NO: 64180 - DNA, 80 bp, synthetic construct; identical to SEQ ID NO: 29732
  source 1..80: mol_type = other DNA

SEQ ID NO: 64181 - DNA, 80 bp, synthetic construct; identical to SEQ ID NO: 29733
  source 1..80: mol_type = other DNA

SEQ ID NO: 64182 - DNA, 80 bp, synthetic construct; identical to SEQ ID NO: 29734
  source 1..80: mol_type = other DNA

SEQ ID NO: 64183 - DNA, 80 bp, synthetic construct; identical to SEQ ID NO: 11333
  source 1..80: mol_type = other DNA

SEQ ID NO: 64184 - DNA, 80 bp, synthetic construct; identical to SEQ ID NO: 29737
  source 1..80: mol_type = other DNA

SEQ ID NO: 64185 - DNA, 80 bp, synthetic construct; identical to SEQ ID NO: 29738
  source 1..80: mol_type = other DNA

SEQ ID NO: 64186 - DNA, 80 bp, synthetic construct; identical to SEQ ID NO: 29739
  source 1..80: mol_type = other DNA

SEQ ID NO: 64187 - DNA, 80 bp, synthetic construct; identical to SEQ ID NO: 11334
  source 1..80: mol_type = other DNA

SEQ ID NO: 64188 - DNA, 80 bp, synthetic construct; identical to SEQ ID NO: 29741
  source 1..80: mol_type = other DNA

SEQ ID NO: 64189 - DNA, 80 bp, synthetic construct; identical to SEQ ID NO: 29742
  source 1..80: mol_type = other DNA

SEQ ID NO: 64190 - DNA, 80 bp, synthetic construct; identical to SEQ ID NO: 11335
  source 1..80: mol_type = other DNA

SEQ ID NO: 64191 - DNA, 80 bp, synthetic construct; identical to SEQ ID NO: 29744
  source 1..80: mol_type = other DNA

SEQ ID NO: 64192 - DNA, 80 bp, synthetic construct; identical to SEQ ID NO: 29745
  source 1..80: mol_type = other DNA

SEQ ID NO: 64193 - DNA, 80 bp, synthetic construct; identical to SEQ ID NO: 29746
  source 1..80: mol_type = other DNA

SEQ ID NO: 64194 - DNA, 80 bp, synthetic construct; identical to SEQ ID NO: 29747
  source 1..80: mol_type = other DNA

SEQ ID NO: 64195 - DNA, 80 bp, synthetic construct; identical to SEQ ID NO: 11336
  source 1..80: mol_type = other DNA

SEQ ID NO: 64196 - DNA, 80 bp, synthetic construct; identical to SEQ ID NO: 29749
  source 1..80: mol_type = other DNA

SEQ ID NO: 64197 - DNA, 80 bp, synthetic construct; identical to SEQ ID NO: 29750
  source 1..80: mol_type = other DNA

SEQ ID NO: 64198 - DNA, 80 bp, synthetic construct; identical to SEQ ID NO: 11337
  source 1..80: mol_type = other DNA

SEQ ID NO: 64199 - DNA, 80 bp, synthetic construct; identical to SEQ ID NO: 29752
  source 1..80: mol_type = other DNA

SEQ ID NO: 64200 - DNA, 80 bp, synthetic construct; identical to SEQ ID NO: 29753
  source 1..80: mol_type = other DNA

SEQ ID NO: 64201 - DNA, 80 bp, synthetic construct; identical to SEQ ID NO: 29754
  source 1..80: mol_type = other DNA

SEQ ID NO: 64202 - DNA, 80 bp, synthetic construct; identical to SEQ ID NO: 11338
  source 1..80: mol_type = other DNA

SEQ ID NO: 64203 - DNA, 80 bp, synthetic construct; identical to SEQ ID NO: 29756
  source 1..80: mol_type = other DNA

SEQ ID NO: 64204 - DNA, 80 bp, synthetic construct; identical to SEQ ID NO: 29757
  source 1..80: mol_type = other DNA

SEQ ID NO: 64205 - DNA, 80 bp, synthetic construct; identical to SEQ ID NO: 29758
  source 1..80: mol_type = other DNA

SEQ ID NO: 64206 - DNA, 80 bp, synthetic construct; identical to SEQ ID NO: 11339
  source 1..80: mol_type = other DNA

SEQ ID NO: 64207 - DNA, 80 bp, synthetic construct; identical to SEQ ID NO: 29760
  source 1..80: mol_type = other DNA

SEQ ID NO: 64208 - DNA, 80 bp, synthetic construct; identical to SEQ ID NO: 29761
  source 1..80: mol_type = other DNA

SEQ ID NO: 64209 - DNA, 80 bp, synthetic construct; identical to SEQ ID NO: 29762
  source 1..80: mol_type = other DNA

SEQ ID NO: 64210 - DNA, 80 bp, synthetic construct; identical to SEQ ID NO: 11340
  source 1..80: mol_type = other DNA

SEQ ID NO: 64211 - DNA, 80 bp, synthetic construct; identical to SEQ ID NO: 29764
  source 1..80: mol_type = other DNA

SEQ ID NO: 64212 - DNA, 80 bp, synthetic construct; identical to SEQ ID NO: 29765
  source 1..80: mol_type = other DNA

SEQ ID NO: 64213 - DNA, 80 bp, synthetic construct; identical to SEQ ID NO: 29766
  source 1..80: mol_type = other DNA

SEQ ID NO: 64214 - DNA, 80 bp, synthetic construct; identical to SEQ ID NO: 11341
  source 1..80: mol_type = other DNA

SEQ ID NO: 64215 - DNA, 80 bp, synthetic construct; identical to SEQ ID NO: 29768
  source 1..80: mol_type = other DNA

SEQ ID NO: 64216 - DNA, 80 bp, synthetic construct; identical to SEQ ID NO: 29769
  source 1..80: mol_type = other DNA

SEQ ID NO: 64217 - DNA, 80 bp, synthetic construct; identical to SEQ ID NO: 29770
  source 1..80: mol_type = other DNA

SEQ ID NO: 64218 - DNA, 80 bp, synthetic construct; identical to SEQ ID NO: 11342
  source 1..80: mol_type = other DNA

SEQ ID NO: 64219 - DNA, 80 bp, synthetic construct; identical to SEQ ID NO: 29772
  source 1..80: mol_type = other DNA

SEQ ID NO: 64220 - DNA, 80 bp, synthetic construct; identical to SEQ ID NO: 29773
  source 1..80: mol_type = other DNA

SEQ ID NO: 64221 - DNA, 80 bp, synthetic construct; identical to SEQ ID NO: 29774
  source 1..80: mol_type = other DNA

SEQ ID NO: 64222 - DNA, 80 bp, synthetic construct; identical to SEQ ID NO: 29775
  source 1..80: mol_type = other DNA

SEQ ID NO: 64223 - DNA, 80 bp, synthetic construct; identical to SEQ ID NO: 11343
  source 1..80: mol_type = other DNA

SEQ ID NO: 64224 - DNA, 80 bp, synthetic construct; identical to SEQ ID NO: 29777
  source 1..80: mol_type = other DNA

SEQ ID NO: 64225 - DNA, 80 bp, synthetic construct; identical to SEQ ID NO: 29778
  source 1..80: mol_type = other DNA

SEQ ID NO: 64226 - DNA, 80 bp, synthetic construct; identical to SEQ ID NO: 11344
  source 1..80: mol_type = other DNA

SEQ ID NO: 64227 - DNA, 80 bp, synthetic construct; identical to SEQ ID NO: 29780
  source 1..80: mol_type = other DNA

SEQ ID NO: 64228 - DNA, 80 bp, synthetic construct; identical to SEQ ID NO: 29781
  source 1..80: mol_type = other DNA

SEQ ID NO: 64229 - DNA, 80 bp, synthetic construct; identical to SEQ ID NO: 29782
  source 1..80: mol_type = other DNA

SEQ ID NO: 64230 - DNA, 80 bp, synthetic construct; identical to SEQ ID NO: 11345
  source 1..80: mol_type = other DNA

SEQ ID NO: 64231 - DNA, 80 bp, synthetic construct; identical to SEQ ID NO: 29784
  source 1..80: mol_type = other DNA

SEQ ID NO: 64232 - DNA, 80 bp, synthetic construct; identical to SEQ ID NO: 29785
  source 1..80: mol_type = other DNA

SEQ ID NO: 64233 - DNA, 80 bp, synthetic construct; identical to SEQ ID NO: 29786
  source 1..80: mol_type = other DNA

SEQ ID NO: 64234 - DNA, 80 bp, synthetic construct; identical to SEQ ID NO: 11346
  source 1..80: mol_type = other DNA

SEQ ID NO: 64235 - DNA, 80 bp, synthetic construct; identical to SEQ ID NO: 29788
  source 1..80: mol_type = other DNA

SEQ ID NO: 64236 - DNA, 80 bp, synthetic construct; identical to SEQ ID NO: 29790
  source 1..80: mol_type = other DNA

SEQ ID NO: 64237 - DNA, 80 bp, synthetic construct; identical to SEQ ID NO: 11347
  source 1..80: mol_type = other DNA

SEQ ID NO: 64238 - DNA, 80 bp, synthetic construct; identical to SEQ ID NO: 29792
  source 1..80: mol_type = other DNA

SEQ ID NO: 64239 - DNA, 80 bp, synthetic construct; identical to SEQ ID NO: 29793
  source 1..80: mol_type = other DNA

SEQ ID NO: 64240 - DNA, 80 bp, synthetic construct; identical to SEQ ID NO: 29794
  source 1..80: mol_type = other DNA

SEQ ID NO: 64241 - DNA, 80 bp, synthetic construct; identical to SEQ ID NO: 29795
  source 1..80: mol_type = other DNA

SEQ ID NO: 64242 - DNA, 80 bp, synthetic construct; identical to SEQ ID NO: 11348
  source 1..80: mol_type = other DNA

SEQ ID NO: 64243 - DNA, 80 bp, synthetic construct; identical to SEQ ID NO: 29797
  source 1..80: mol_type = other DNA

SEQ ID NO: 64244 - DNA, 80 bp, synthetic construct; identical to SEQ ID NO: 29798
  source 1..80: mol_type = other DNA

SEQ ID NO: 64245 - DNA, 80 bp, synthetic construct; identical to SEQ ID NO: 29799
  source 1..80: mol_type = other DNA

SEQ ID NO: 64246 - DNA, 80 bp, synthetic construct; identical to SEQ ID NO: 11349
  source 1..80: mol_type = other DNA

SEQ ID NO: 64247 - DNA, 80 bp, synthetic construct; identical to SEQ ID NO: 29801
  source 1..80: mol_type = other DNA

SEQ ID NO: 64248 - DNA, 80 bp, synthetic construct; identical to SEQ ID NO: 29802
  source 1..80: mol_type = other DNA

SEQ ID NO: 64249 - DNA, 80 bp, synthetic construct; identical to SEQ ID NO: 29803
  source 1..80: mol_type = other DNA

SEQ ID NO: 64250 - DNA, 80 bp, synthetic construct; identical to SEQ ID NO: 11350
  source 1..80: mol_type = other DNA

SEQ ID NO: 64251 - DNA, 80 bp, synthetic construct; identical to SEQ ID NO: 29805
  source 1..80: mol_type = other DNA

SEQ ID NO: 64252 - DNA, 80 bp, synthetic construct; identical to SEQ ID NO: 29806
  source 1..80: mol_type = other DNA

SEQ ID NO: 64253 - DNA, 80 bp, synthetic construct; identical to SEQ ID NO: 29807
  source 1..80: mol_type = other DNA

SEQ ID NO: 64254 - DNA, 80 bp, synthetic construct; identical to SEQ ID NO: 29808
  source 1..80: mol_type = other DNA

SEQ ID NO: 64255 - DNA, 80 bp, synthetic construct; identical to SEQ ID NO: 11351
  source 1..80: mol_type = other DNA

SEQ ID NO: 64256 - DNA, 80 bp, synthetic construct; identical to SEQ ID NO: 29810
  source 1..80: mol_type = other DNA

SEQ ID NO: 64257 - DNA, 80 bp, synthetic construct; identical to SEQ ID NO: 29811
  source 1..80: mol_type = other DNA

SEQ ID NO: 64258 - DNA, 80 bp, synthetic construct; identical to SEQ ID NO: 11352
  source 1..80: mol_type = other DNA

SEQ ID NO: 64259 - DNA, 80 bp, synthetic construct; identical to SEQ ID NO: 29813
  source 1..80: mol_type = other DNA

SEQ ID NO: 64260 - DNA, 80 bp, synthetic construct; identical to SEQ ID NO: 29814
  source 1..80: mol_type = other DNA

SEQ ID NO: 64261 - DNA, 80 bp, synthetic construct; identical to SEQ ID NO: 29815
  source 1..80: mol_type = other DNA

SEQ ID NO: 64262 - DNA, 80 bp, synthetic construct; identical to SEQ ID NO: 29816
  source 1..80: mol_type = other DNA

SEQ ID NO: 64263 - DNA, 80 bp, synthetic construct; identical to SEQ ID NO: 11353
  source 1..80: mol_type = other DNA

SEQ ID NO: 64264 - DNA, 80 bp, synthetic construct; identical to SEQ ID NO: 29818
  source 1..80: mol_type = other DNA

SEQ ID NO: 64265 - DNA, 80 bp, synthetic construct; identical to SEQ ID NO: 29819
  source 1..80: mol_type = other DNA

SEQ ID NO: 64266 - DNA, 80 bp, synthetic construct; identical to SEQ ID NO: 29820
  source 1..80: mol_type = other DNA

SEQ ID NO: 64267 - DNA, 80 bp, synthetic construct; identical to SEQ ID NO: 29821
  source 1..80: mol_type = other DNA

SEQ ID NO: 64268 - DNA, 80 bp, synthetic construct; identical to SEQ ID NO: 11354
  source 1..80: mol_type = other DNA

SEQ ID NO: 64269 - DNA, 80 bp, synthetic construct; identical to SEQ ID NO: 29823
  source 1..80: mol_type = other DNA

SEQ ID NO: 64270 - DNA, 80 bp, synthetic construct; identical to SEQ ID NO: 29824
  source 1..80: mol_type = other DNA

SEQ ID NO: 64271 - DNA, 80 bp, synthetic construct; identical to SEQ ID NO: 29825
  source 1..80: mol_type = other DNA

SEQ ID NO: 64272 - DNA, 80 bp, synthetic construct; identical to SEQ ID NO: 29826
  source 1..80: mol_type = other DNA

SEQ ID NO: 64273 - DNA, 80 bp, synthetic construct; identical to SEQ ID NO: 11355
  source 1..80: mol_type = other DNA

SEQ ID NO: 64274 - DNA, 80 bp, synthetic construct; identical to SEQ ID NO: 29828
  source 1..80: mol_type = other DNA

SEQ ID NO: 64275 - DNA, 80 bp, synthetic construct; identical to SEQ ID NO: 29829
  source 1..80: mol_type = other DNA

SEQ ID NO: 64276 - DNA, 80 bp, synthetic construct; identical to SEQ ID NO: 11356
  source 1..80: mol_type = other DNA

SEQ ID NO: 64277 - DNA, 80 bp, synthetic construct; identical to SEQ ID NO: 29832
  source 1..80: mol_type = other DNA

SEQ ID NO: 64278 - DNA, 80 bp, synthetic construct; identical to SEQ ID NO: 29833
  source 1..80: mol_type = other DNA

SEQ ID NO: 64279 - DNA, 80 bp, synthetic construct; identical to SEQ ID NO: 29834
  source 1..80: mol_type = other DNA

SEQ ID NO: 64280 - DNA, 80 bp, synthetic construct; identical to SEQ ID NO: 11357
  source 1..80: mol_type = other DNA

SEQ ID NO: 64281 - DNA, 80 bp, synthetic construct; identical to SEQ ID NO: 29836
  source 1..80: mol_type = other DNA

SEQ ID NO: 64282 - DNA, 80 bp, synthetic construct; identical to SEQ ID NO: 29837
  source 1..80: mol_type = other DNA

SEQ ID NO: 64283 - DNA, 80 bp, synthetic construct; identical to SEQ ID NO: 11358
  source 1..80: mol_type = other DNA

SEQ ID NO: 64284 - DNA, 80 bp, synthetic construct; identical to SEQ ID NO: 29839
  source 1..80: mol_type = other DNA

SEQ ID NO: 64285 - DNA, 80 bp, synthetic construct; identical to SEQ ID NO: 29840
  source 1..80: mol_type = other DNA

SEQ ID NO: 64286 - DNA, 80 bp, synthetic construct; identical to SEQ ID NO: 29841
  source 1..80: mol_type = other DNA

SEQ ID NO: 64287 - DNA, 80 bp, synthetic construct; identical to SEQ ID NO: 11359
  source 1..80: mol_type = other DNA

SEQ ID NO: 64288 - DNA, 80 bp, synthetic construct; identical to SEQ ID NO: 29844
  source 1..80: mol_type = other DNA

SEQ ID NO: 64289 - DNA, 80 bp, synthetic construct; identical to SEQ ID NO: 29845
  source 1..80: mol_type = other DNA

SEQ ID NO: 64290 - DNA, 80 bp, synthetic construct; identical to SEQ ID NO: 11360
  source 1..80: mol_type = other DNA

SEQ ID NO: 64291 - DNA, 80 bp, synthetic construct; identical to SEQ ID NO: 29847
  source 1..80: mol_type = other DNA

SEQ ID NO: 64292 - DNA, 80 bp, synthetic construct; identical to SEQ ID NO: 29848
  source 1..80: mol_type = other DNA

SEQ ID NO: 64293 - DNA, 80 bp, synthetic construct; identical to SEQ ID NO: 29849
  source 1..80: mol_type = other DNA

SEQ ID NO: 64294 - DNA, 80 bp, synthetic construct; identical to SEQ ID NO: 11361
  source 1..80: mol_type = other DNA

SEQ ID NO: 64295 - DNA, 80 bp, synthetic construct; identical to SEQ ID NO: 29851
  source 1..80: mol_type = other DNA

SEQ ID NO: 64296 - DNA, 80 bp, synthetic construct; identical to SEQ ID NO: 29852
  source 1..80: mol_type = other DNA

SEQ ID NO: 64297 - DNA, 80 bp, synthetic construct; identical to SEQ ID NO: 29853
  source 1..80: mol_type = other DNA

SEQ ID NO: 64298 - DNA, 80 bp, synthetic construct; identical to SEQ ID NO: 11362
  source 1..80: mol_type = other DNA

SEQ ID NO: 64299 - DNA, 80 bp, synthetic construct; identical to SEQ ID NO: 29855
  source 1..80: mol_type = other DNA

SEQ ID NO: 64300 - DNA, 80 bp, synthetic construct; identical to SEQ ID NO: 29856
  source 1..80: mol_type = other DNA

SEQ ID NO: 64301 - DNA, 80 bp, synthetic construct; identical to SEQ ID NO: 29857
  source 1..80: mol_type = other DNA

SEQ ID NO: 64302 - DNA, 80 bp, synthetic construct; identical to SEQ ID NO: 29858
  source 1..80: mol_type = other DNA

SEQ ID NO: 64303 - DNA, 80 bp, synthetic construct; identical to SEQ ID NO: 11363
  source 1..80: mol_type = other DNA

SEQ ID NO: 64304 - DNA, 80 bp, synthetic construct; identical to SEQ ID NO: 29860
  source 1..80: mol_type = other DNA

SEQ ID NO: 64305 - DNA, 80 bp, synthetic construct; identical to SEQ ID NO: 29861
  source 1..80: mol_type = other DNA

SEQ ID NO: 64306 - DNA, 80 bp, synthetic construct; identical to SEQ ID NO: 29862
  source 1..80: mol_type = other DNA

SEQ ID NO: 64307 - DNA, 80 bp, synthetic construct; identical to SEQ ID NO: 11364
  source 1..80: mol_type = other DNA

SEQ ID NO: 64308 - DNA, 80 bp, synthetic construct; identical to SEQ ID NO: 29864
  source 1..80: mol_type = other DNA

SEQ ID NO: 64309 - DNA, 80 bp, synthetic construct; identical to SEQ ID NO: 29865
  source 1..80: mol_type = other DNA

SEQ ID NO: 64310 - DNA, 80 bp, synthetic construct; identical to SEQ ID NO: 11365
  source 1..80: mol_type = other DNA

SEQ ID NO: 64311 - DNA, 80 bp, synthetic construct; identical to SEQ ID NO: 29867
  source 1..80: mol_type = other DNA

SEQ ID NO: 64312 - DNA, 80 bp, synthetic construct; identical to SEQ ID NO: 29868
  source 1..80: mol_type = other DNA

SEQ ID NO: 64313 - DNA, 80 bp, synthetic construct; identical to SEQ ID NO: 29869
  source 1..80: mol_type = other DNA

SEQ ID NO: 64314 - DNA, 80 bp, synthetic construct; identical to SEQ ID NO: 11366
  source 1..80: mol_type = other DNA

SEQ ID NO: 64315 - DNA, 80 bp, synthetic construct; identical to SEQ ID NO: 29871
  source 1..80: mol_type = other DNA

SEQ ID NO: 64316 - DNA, 80 bp, synthetic construct; identical to SEQ ID NO: 29872
  source 1..80: mol_type = other DNA

SEQ ID NO: 64317 - DNA, 80 bp, synthetic construct; identical to SEQ ID NO: 29873
  source 1..80: mol_type = other DNA

SEQ ID NO: 64318 - DNA, 80 bp, synthetic construct; identical to SEQ ID NO: 29874
  source 1..80: mol_type = other DNA

SEQ ID NO: 64319 - DNA, 80 bp, synthetic construct; identical to SEQ ID NO: 11367
  source 1..80: mol_type = other DNA

SEQ ID NO: 64320 - DNA, 80 bp, synthetic construct; identical to SEQ ID NO: 29876
  source 1..80: mol_type = other DNA

SEQ ID NO: 64321 - DNA, 80 bp, synthetic construct; identical to SEQ ID NO: 29877
  source 1..80: mol_type = other DNA

SEQ ID NO: 64322 - DNA, 80 bp, synthetic construct; identical to SEQ ID NO: 29878
  source 1..80: mol_type = other DNA

SEQ ID NO: 64323 - DNA, 80 bp, synthetic construct; identical to SEQ ID NO: 11368
  source 1..80: mol_type = other DNA

SEQ ID NO: 64324 - DNA, 80 bp, synthetic construct; identical to SEQ ID NO: 29880
  source 1..80: mol_type = other DNA

SEQ ID NO: 64325 - DNA, 80 bp, synthetic construct; identical to SEQ ID NO: 29881
  source 1..80: mol_type = other DNA

SEQ ID NO: 64326 - DNA, 80 bp, synthetic construct; identical to SEQ ID NO: 11369
  source 1..80: mol_type = other DNA

SEQ ID NO: 64327 - DNA, 80 bp, synthetic construct; identical to SEQ ID NO: 29883
  source 1..80: mol_type = other DNA

SEQ ID NO: 64328 - DNA, 80 bp, synthetic construct; identical to SEQ ID NO: 29884
  source 1..80: mol_type = other DNA

SEQ ID NO: 64329 - DNA, 80 bp, synthetic construct; identical to SEQ ID NO: 29885
  source 1..80: mol_type = other DNA

SEQ ID NO: 64330 - DNA, 80 bp, synthetic construct; identical to SEQ ID NO: 29886
  source 1..80: mol_type = other DNA

SEQ ID NO: 64331 - DNA, 80 bp, synthetic construct; identical to SEQ ID NO: 11370
  source 1..80: mol_type = other DNA

SEQ ID NO: 64332 - DNA, 80 bp, synthetic construct; identical to SEQ ID NO: 29888
  source 1..80: mol_type = other DNA

SEQ ID NO: 64333 - DNA, 80 bp, synthetic construct; identical to SEQ ID NO: 29889
  source 1..80: mol_type = other DNA

SEQ ID NO: 64334 - DNA, 80 bp, synthetic construct; identical to SEQ ID NO: 29890
  source 1..80: mol_type = other DNA

SEQ ID NO: 64335 - DNA, 80 bp, synthetic construct; identical to SEQ ID NO: 11371
  source 1..80: mol_type = other DNA

SEQ ID NO: 64336 - DNA, 80 bp, synthetic construct; identical to SEQ ID NO: 29892
  source 1..80: mol_type = other DNA

SEQ ID NO: 64337 - DNA, 80 bp, synthetic construct; identical to SEQ ID NO: 29893
  source 1..80: mol_type = other DNA

SEQ ID NO: 64338 - DNA, 80 bp, synthetic construct; identical to SEQ ID NO: 11372
  source 1..80: mol_type = other DNA

SEQ ID NO: 64339 - DNA, 80 bp, synthetic construct; identical to SEQ ID NO: 29896
  source 1..80: mol_type = other DNA

SEQ ID NO: 64340 - DNA, 80 bp, synthetic construct; identical to SEQ ID NO: 29897
  source 1..80: mol_type = other DNA

SEQ ID NO: 64341 - DNA, 80 bp, synthetic construct; identical to SEQ ID NO: 29898
  source 1..80: mol_type = other DNA

SEQ ID NO: 64342 - DNA, 80 bp, synthetic construct; identical to SEQ ID NO: 29899
  source 1..80: mol_type = other DNA

SEQ ID NO: 64343 - DNA, 80 bp, synthetic construct; identical to SEQ ID NO: 11373
  source 1..80: mol_type = other DNA

SEQ ID NO: 64344 - DNA, 80 bp, synthetic construct; identical to SEQ ID NO: 29901
  source 1..80: mol_type = other DNA

SEQ ID NO: 64345 - DNA, 80 bp, synthetic construct; identical to SEQ ID NO: 29903
  source 1..80: mol_type = other DNA

SEQ ID NO: 64346 - DNA, 80 bp, synthetic construct; identical to SEQ ID NO: 11374
  source 1..80: mol_type = other DNA

SEQ ID NO: 64347 - DNA, 80 bp, synthetic construct; identical to SEQ ID NO: 29905
  source 1..80: mol_type = other DNA

SEQ ID NO: 64348 - DNA, 80 bp, synthetic construct; identical to SEQ ID NO: 29906
  source 1..80: mol_type = other DNA

SEQ ID NO: 64349 - DNA, 80 bp, synthetic construct; identical to SEQ ID NO: 29907
  source 1..80: mol_type = other DNA

SEQ ID NO: 64350 - DNA, 80 bp, synthetic construct; identical to SEQ ID NO: 11375
  source 1..80: mol_type = other DNA

SEQ ID NO: 64351 - DNA, 80 bp, synthetic construct; identical to SEQ ID NO: 29909
  source 1..80: mol_type = other DNA

SEQ ID NO: 64352 - DNA, 80 bp, synthetic construct; identical to SEQ ID NO: 29910
  source 1..80: mol_type = other DNA

SEQ ID NO: 64353 - DNA, 80 bp, synthetic construct; identical to SEQ ID NO: 29911
  source 1..80: mol_type = other DNA

SEQ ID NO: 64354 - DNA, 80 bp, synthetic construct; identical to SEQ ID NO: 11376
  source 1..80: mol_type = other DNA

SEQ ID NO: 64355 - DNA, 80 bp, synthetic construct; identical to SEQ ID NO: 29913
  source 1..80: mol_type = other DNA

SEQ ID NO: 64356 - DNA, 80 bp, synthetic construct; identical to SEQ ID NO: 29914
  source 1..80: mol_type = other DNA

SEQ ID NO: 64357 - DNA, 80 bp, synthetic construct; identical to SEQ ID NO: 29915
  source 1..80: mol_type = other DNA

SEQ ID NO: 64358 - DNA, 80 bp, synthetic construct; identical to SEQ ID NO: 11377
  source 1..80: mol_type = other DNA

SEQ ID NO: 64359 - DNA, 80 bp, synthetic construct; identical to SEQ ID NO: 29917
  source 1..80: mol_type = other DNA

SEQ ID NO: 64360 - DNA, 80 bp, synthetic construct; identical to SEQ ID NO: 29918
  source 1..80: mol_type = other DNA

SEQ ID NO: 64361 - DNA, 80 bp, synthetic construct; identical to SEQ ID NO: 11378
  source 1..80: mol_type = other DNA

SEQ ID NO: 64362 - DNA, 80 bp, synthetic construct; identical to SEQ ID NO: 29920
  source 1..80: mol_type = other DNA

SEQ ID NO: 64363 - DNA, 80 bp, synthetic construct; identical to SEQ ID NO: 29921
  source 1..80: mol_type = other DNA

SEQ ID NO: 64364 - DNA, 80 bp, synthetic construct; identical to SEQ ID NO: 29922
  source 1..80: mol_type = other DNA

SEQ ID NO: 64365 - DNA, 80 bp, synthetic construct; identical to SEQ ID NO: 29923
  source 1..80: mol_type = other DNA

SEQ ID NO: 64366 - DNA, 80 bp, synthetic construct; identical to SEQ ID NO: 11379
  source 1..80: mol_type = other DNA

SEQ ID NO: 64367 - DNA, 80 bp, synthetic construct; identical to SEQ ID NO: 29925
  source 1..80: mol_type = other DNA

SEQ ID NO: 64368 - DNA, 80 bp, synthetic construct; identical to SEQ ID NO: 29926
  source 1..80: mol_type = other DNA

SEQ ID NO: 64369 - DNA, 80 bp, synthetic construct; identical to SEQ ID NO: 29927
  source 1..80: mol_type = other DNA

SEQ ID NO: 64370 - DNA, 80 bp, synthetic construct; identical to SEQ ID NO: 11380
  source 1..80: mol_type = other DNA

SEQ ID NO: 64371 - DNA, 80 bp, synthetic construct; identical to SEQ ID NO: 29929
  source 1..80: mol_type = other DNA

SEQ ID NO: 64372 - DNA, 80 bp, synthetic construct; identical to SEQ ID NO: 29930
  source 1..80: mol_type = other DNA

SEQ ID NO: 64373 - DNA, 80 bp, synthetic construct; identical to SEQ ID NO: 11381
  source 1..80: mol_type = other DNA

SEQ ID NO: 64374 - DNA, 80 bp, synthetic construct; identical to SEQ ID NO: 29932
  source 1..80: mol_type = other DNA

SEQ ID NO: 64375 - DNA, 80 bp, synthetic construct; identical to SEQ ID NO: 29933
  source 1..80: mol_type = other DNA

SEQ ID NO: 64376 - DNA, 80 bp, synthetic construct; identical to SEQ ID NO: 29934
  source 1..80: mol_type = other DNA

SEQ ID NO: 64377 - DNA, 80 bp, synthetic construct; identical to SEQ ID NO: 11382
  source 1..80: mol_type = other DNA

SEQ ID NO: 64378 - DNA, 80 bp, synthetic construct; identical to SEQ ID NO: 29936
  source 1..80: mol_type = other DNA

SEQ ID NO: 64379 - DNA, 80 bp, synthetic construct; identical to SEQ ID NO: 29937
  source 1..80: mol_type = other DNA

SEQ ID NO: 64380 - DNA, 80 bp, synthetic construct; identical to SEQ ID NO: 11383
  source 1..80: mol_type = other DNA

SEQ ID NO: 64381 - DNA, 80 bp, synthetic construct; identical to SEQ ID NO: 29940
  source 1..80: mol_type = other DNA

SEQ ID NO: 64382 - DNA, 80 bp, synthetic construct; identical to SEQ ID NO: 29941
  source 1..80: mol_type = other DNA

SEQ ID NO: 64383 - DNA, 80 bp, synthetic construct; identical to SEQ ID NO: 29942
  source 1..80: mol_type = other DNA

SEQ ID NO: 64384 - DNA, 80 bp, synthetic construct; identical to SEQ ID NO: 11384
  source 1..80: mol_type = other DNA

SEQ ID NO: 64385 - DNA, 80 bp, synthetic construct; identical to SEQ ID NO: 29944
  source 1..80: mol_type = other DNA

SEQ ID NO: 64386 - DNA, 80 bp, synthetic construct; identical to SEQ ID NO: 29945
  source 1..80: mol_type = other DNA

SEQ ID NO: 64387 - DNA, 80 bp, synthetic construct; identical to SEQ ID NO: 29946
  source 1..80: mol_type = other DNA

SEQ ID NO: 64388 - DNA, 80 bp, synthetic construct; identical to SEQ ID NO: 29947
  source 1..80: mol_type = other DNA

SEQ ID NO: 64389 - DNA, 80 bp, synthetic construct; identical to SEQ ID NO: 11385
  source 1..80: mol_type = other DNA

SEQ ID NO: 64390 - DNA, 80 bp, synthetic construct; identical to SEQ ID NO: 29950
  source 1..80: mol_type = other DNA

SEQ ID NO: 64391 - DNA, 80 bp, synthetic construct; identical to SEQ ID NO: 11386
  source 1..80: mol_type = other DNA

SEQ ID NO: 64392 - DNA, 80 bp, synthetic construct; identical to SEQ ID NO: 29952
  source 1..80: mol_type = other DNA

SEQ ID NO: 64393 - DNA, 80 bp, synthetic construct; identical to SEQ ID NO: 29953
  source 1..80: mol_type = other DNA

SEQ ID NO: 64394 - DNA, 80 bp, synthetic construct; identical to SEQ ID NO: 29954
  source 1..80: mol_type = other DNA

SEQ ID NO: 64395 - DNA, 80 bp, synthetic construct; identical to SEQ ID NO: 29955
  source 1..80: mol_type = other DNA

SEQ ID NO: 64396 - DNA, 80 bp, synthetic construct; identical to SEQ ID NO: 11387
  source 1..80: mol_type = other DNA

SEQ ID NO: 64397 - DNA, 80 bp, synthetic construct; identical to SEQ ID NO: 29957
  source 1..80: mol_type = other DNA

SEQ ID NO: 64398 - DNA, 80 bp, synthetic construct; identical to SEQ ID NO: 29958
  source 1..80: mol_type = other DNA

SEQ ID NO: 64399 - DNA, 80 bp, synthetic construct; identical to SEQ ID NO: 29959
  source 1..80: mol_type = other DNA

SEQ ID NO: 64400 - DNA, 80 bp, synthetic construct; identical to SEQ ID NO: 11388
  source 1..80: mol_type = other DNA

SEQ ID NO: 64401 - DNA, 80 bp, synthetic construct; identical to SEQ ID NO: 29961
  source 1..80: mol_type = other DNA

SEQ ID NO: 64402 - DNA, 80 bp, synthetic construct; identical to SEQ ID NO: 29962
  source 1..80: mol_type = other DNA

SEQ ID NO: 64403 - DNA, 80 bp, synthetic construct; identical to SEQ ID NO: 11389
  source 1..80: mol_type = other DNA

SEQ ID NO: 64404 - DNA, 80 bp, synthetic construct; identical to SEQ ID NO: 29964
  source 1..80: mol_type = other DNA

SEQ ID NO: 64405 - DNA, 80 bp, synthetic construct; identical to SEQ ID NO: 29965
  source 1..80: mol_type = other DNA

SEQ ID NO: 64406 - DNA, 80 bp, synthetic construct; identical to SEQ ID NO: 29966
  source 1..80: mol_type = other DNA

SEQ ID NO: 64407 - DNA, 80 bp, synthetic construct; identical to SEQ ID NO: 11390
  source 1..80: mol_type = other DNA

SEQ ID NO: 64408 - DNA, 80 bp, synthetic construct; identical to SEQ ID NO: 29968
  source 1..80: mol_type = other DNA

SEQ ID NO: 64409 - DNA, 80 bp, synthetic construct; identical to SEQ ID NO: 29969
  source 1..80: mol_type = other DNA

SEQ ID NO: 64410 - DNA, 80 bp, synthetic construct; identical to SEQ ID NO: 29970
  source 1..80: mol_type = other DNA

SEQ ID NO: 64411 - DNA, 80 bp, synthetic construct; identical to SEQ ID NO: 11391
  source 1..80: mol_type = other DNA

SEQ ID NO: 64412 - DNA, 80 bp, synthetic construct; identical to SEQ ID NO: 29972
  source 1..80: mol_type = other DNA

SEQ ID NO: 64413 - DNA, 80 bp, synthetic construct; identical to SEQ ID NO: 29973
  source 1..80: mol_type = other DNA

SEQ ID NO: 64414 - DNA, 80 bp, synthetic construct; identical to SEQ ID NO: 29974
  source 1..80: mol_type = other DNA

SEQ ID NO: 64415 - DNA, 80 bp, synthetic construct; identical to SEQ ID NO: 29975
  source 1..80: mol_type = other DNA

SEQ ID NO: 64416 - DNA, 80 bp, synthetic construct; identical to SEQ ID NO: 11392
  source 1..80: mol_type = other DNA

SEQ ID NO: 64417 - DNA, 80 bp, synthetic construct; identical to SEQ ID NO: 29977
  source 1..80: mol_type = other DNA

SEQ ID NO: 64418 - DNA, 80 bp, synthetic construct; identical to SEQ ID NO: 29978
  source 1..80: mol_type = other DNA

SEQ ID NO: 64419 - DNA, 80 bp, synthetic construct; identical to SEQ ID NO: 29979
  source 1..80: mol_type = other DNA

SEQ ID NO: 64420 - DNA, 80 bp, synthetic construct; identical to SEQ ID NO: 29980
  source 1..80: mol_type = other DNA

SEQ ID NO: 64421 - DNA, 80 bp, synthetic construct; identical to SEQ ID NO: 11393
  source 1..80: mol_type = other DNA

SEQ ID NO: 64422 - DNA, 80 bp, synthetic construct; identical to SEQ ID NO: 29982
  source 1..80: mol_type = other DNA

SEQ ID NO: 64423 - DNA, 80 bp, synthetic construct; identical to SEQ ID NO: 29983
  source 1..80: mol_type = other DNA

SEQ ID NO: 64424 - DNA, 80 bp, synthetic construct; identical to SEQ ID NO: 29984
  source 1..80: mol_type = other DNA

SEQ ID NO: 64425 - DNA, 80 bp, synthetic construct; identical to SEQ ID NO: 11394
  source 1..80: mol_type = other DNA

SEQ ID NO: 64426 - DNA, 80 bp, synthetic construct; identical to SEQ ID NO: 29986
  source 1..80: mol_type = other DNA

SEQ ID NO: 64427 - DNA, 80 bp, synthetic construct; identical to SEQ ID NO: 29987
  source 1..80: mol_type = other DNA

SEQ ID NO: 64428 - DNA, 80 bp, synthetic construct; identical to SEQ ID NO: 29988
  source 1..80: mol_type = other DNA

SEQ ID NO: 64429 - DNA, 80 bp, synthetic construct; identical to SEQ ID NO: 11395
  source 1..80: mol_type = other DNA

SEQ ID NO: 64430 - DNA, 80 bp, synthetic construct; identical to SEQ ID NO: 29990
  source 1..80: mol_type = other DNA

SEQ ID NO: 64431 - DNA, 80 bp, synthetic construct; identical to SEQ ID NO: 29991
  source 1..80: mol_type = other DNA

SEQ ID NO: 64432 - DNA, 80 bp, synthetic construct; identical to SEQ ID NO: 29992
  source 1..80: mol_type = other DNA

SEQ ID NO: 64433 - DNA, 80 bp, synthetic construct; identical to SEQ ID NO: 11396
  source 1..80: mol_type = other DNA

SEQ ID NO: 64434 - DNA, 80 bp, synthetic construct; identical to SEQ ID NO: 29994
  source 1..80: mol_type = other DNA

SEQ ID NO: 64435 - DNA, 80 bp, synthetic construct; identical to SEQ ID NO: 29995
  source 1..80: mol_type = other DNA

SEQ ID NO: 64436 - DNA, 80 bp, synthetic construct; identical to SEQ ID NO: 29996
  source 1..80: mol_type = other DNA

SEQ ID NO: 64437 - DNA, 80 bp, synthetic construct; identical to SEQ ID NO: 11397
  source 1..80: mol_type = other DNA

SEQ ID NO: 64438 - DNA, 80 bp, synthetic construct; identical to SEQ ID NO: 29998
  source 1..80: mol_type = other DNA

SEQ ID NO: 64439 - DNA, 80 bp, synthetic construct; identical to SEQ ID NO: 29999
  source 1..80: mol_type = other DNA

SEQ ID NO: 64440 - DNA, 80 bp, synthetic construct; identical to SEQ ID NO: 30000
  source 1..80: mol_type = other DNA

SEQ ID NO: 64441 - DNA, 80 bp, synthetic construct; identical to SEQ ID NO: 11398
  source 1..80: mol_type = other DNA

SEQ ID NO: 64442 - DNA, 80 bp, synthetic construct; identical to SEQ ID NO: 30002
  source 1..80: mol_type = other DNA

SEQ ID NO: 64443 - DNA, 80 bp, synthetic construct; identical to SEQ ID NO: 30003
  source 1..80: mol_type = other DNA

SEQ ID NO: 64444 - DNA, 80 bp, synthetic construct; identical to SEQ ID NO: 30004
  source 1..80: mol_type = other DNA

SEQ ID NO: 64445 - DNA, 80 bp, synthetic construct; identical to SEQ ID NO: 11399
  source 1..80: mol_type = other DNA

SEQ ID NO: 64446 - DNA, 80 bp, synthetic construct; identical to SEQ ID NO: 30006
  source 1..80: mol_type = other DNA

SEQ ID NO: 64447 - DNA, 80 bp, synthetic construct; identical to SEQ ID NO: 30007
  source 1..80: mol_type = other DNA

SEQ ID NO: 64448 - DNA, 80 bp, synthetic construct; identical to SEQ ID NO: 30008
  source 1..80: mol_type = other DNA

SEQ ID NO: 64449 - DNA, 80 bp, synthetic construct; identical to SEQ ID NO: 11400
  source 1..80: mol_type = other DNA

SEQ ID NO: 64450 - DNA, 80 bp, synthetic construct; identical to SEQ ID NO: 30010
  source 1..80: mol_type = other DNA

SEQ ID NO: 64451 - DNA, 80 bp, synthetic construct; identical to SEQ ID NO: 30011
  source 1..80: mol_type = other DNA

SEQ ID NO: 64452 - DNA, 80 bp, synthetic construct; identical to SEQ ID NO: 30012
  source 1..80: mol_type = other DNA

SEQ ID NO: 64453 - DNA, 80 bp, synthetic construct; identical to SEQ ID NO: 11401
  source 1..80: mol_type = other DNA

SEQ ID NO: 64454 - DNA, 80 bp, synthetic construct; identical to SEQ ID NO: 30014
  source 1..80: mol_type = other DNA

SEQ ID NO: 64455 - DNA, 80 bp, synthetic construct; identical to SEQ ID NO: 30015
  source 1..80: mol_type = other DNA

SEQ ID NO: 64456 - DNA, 80 bp, synthetic construct; identical to SEQ ID NO: 30016
  source 1..80: mol_type = other DNA

SEQ ID NO: 64457 - DNA, 80 bp, synthetic construct; identical to SEQ ID NO: 11402
  source 1..80: mol_type = other DNA

SEQ ID NO: 64458 - DNA, 80 bp, synthetic construct; identical to SEQ ID NO: 30018
  source 1..80: mol_type = other DNA

SEQ ID NO: 64459 - DNA, 80 bp, synthetic construct; identical to SEQ ID NO: 30019
  source 1..80: mol_type = other DNA

SEQ ID NO: 64460 - DNA, 80 bp, synthetic construct; identical to SEQ ID NO: 30020
  source 1..80: mol_type = other DNA

SEQ ID NO: 64461 - DNA, 80 bp, synthetic construct; identical to SEQ ID NO: 11403
  source 1..80: mol_type = other DNA

SEQ ID NO: 64462 - DNA, 80 bp, synthetic construct; identical to SEQ ID NO: 30023
  source 1..80: mol_type = other DNA

SEQ ID NO: 64463 - DNA, 80 bp, synthetic construct; identical to SEQ ID NO: 30024
  source 1..80: mol_type = other DNA

SEQ ID NO: 64464 - DNA, 80 bp, synthetic construct; identical to SEQ ID NO: 11404
  source 1..80: mol_type = other DNA

SEQ ID NO: 64465 - DNA, 80 bp, synthetic construct; identical to SEQ ID NO: 30027
  source 1..80: mol_type = other DNA

SEQ ID NO: 64466 - DNA, 80 bp, synthetic construct; identical to SEQ ID NO: 30028
  source 1..80: mol_type = other DNA

SEQ ID NO: 64467 - DNA, 80 bp, synthetic construct; identical to SEQ ID NO: 11405
  source 1..80: mol_type = other DNA

SEQ ID NO: 64468 - DNA, 80 bp, synthetic construct; identical to SEQ ID NO: 30031
  source 1..80: mol_type = other DNA

SEQ ID NO: 64469 - DNA, 80 bp, synthetic construct; identical to SEQ ID NO: 30032
  source 1..80: mol_type = other DNA

SEQ ID NO: 64470 - DNA, 80 bp, synthetic construct; identical to SEQ ID NO: 30033
  source 1..80: mol_type = other DNA

SEQ ID NO: 64471 - DNA, 80 bp, synthetic construct; identical to SEQ ID NO: 11406
  source 1..80: mol_type = other DNA

SEQ ID NO: 64472 - DNA, 80 bp, synthetic construct; identical to SEQ ID NO: 30035
  source 1..80: mol_type = other DNA

SEQ ID NO: 64473 - DNA, 80 bp, synthetic construct; identical to SEQ ID NO: 30036
  source 1..80: mol_type = other DNA

SEQ ID NO: 64474 - DNA, 80 bp, synthetic construct; identical to SEQ ID NO: 30037
  source 1..80: mol_type = other DNA

SEQ ID NO: 64475 - DNA, 80 bp, synthetic construct; identical to SEQ ID NO: 11407
  source 1..80: mol_type = other DNA

SEQ ID NO: 64476 - DNA, 80 bp, synthetic construct; identical to SEQ ID NO: 30039
  source 1..80: mol_type = other DNA

SEQ ID NO: 64477 - DNA, 80 bp, synthetic construct; identical to SEQ ID NO: 30040
  source 1..80: mol_type = other DNA

SEQ ID NO: 64478 - DNA, 80 bp, synthetic construct; identical to SEQ ID NO: 30041
  source 1..80: mol_type = other DNA

SEQ ID NO: 64479 - DNA, 80 bp, synthetic construct; identical to SEQ ID NO: 11408
  source 1..80: mol_type = other DNA

SEQ ID NO: 64480 - DNA, 80 bp, synthetic construct; identical to SEQ ID NO: 30043
  source 1..80: mol_type = other DNA

SEQ ID NO: 64481 - DNA, 80 bp, synthetic construct; identical to SEQ ID NO: 30044
  source 1..80: mol_type = other DNA

SEQ ID NO: 64482 - DNA, 80 bp, synthetic construct; identical to SEQ ID NO: 30045
  source 1..80: mol_type = other DNA

SEQ ID NO: 64483 - DNA, 80 bp, synthetic construct; identical to SEQ ID NO: 11409
  source 1..80: mol_type = other DNA

SEQ ID NO: 64484 - DNA, 80 bp, synthetic construct; identical to SEQ ID NO: 30047
  source 1..80: mol_type = other DNA

SEQ ID NO: 64485 - DNA, 80 bp, synthetic construct; identical to SEQ ID NO: 30048
  source 1..80: mol_type = other DNA

SEQ ID NO: 64486 - DNA, 80 bp, synthetic construct; identical to SEQ ID NO: 30049
  source 1..80: mol_type = other DNA

SEQ ID NO: 64487 - DNA, 80 bp, synthetic construct; identical to SEQ ID NO: 11410
  source 1..80: mol_type = other DNA

SEQ ID NO: 64488 - DNA, 80 bp, synthetic construct; identical to SEQ ID NO: 30051
  source 1..80: mol_type = other DNA

SEQ ID NO: 64489 - DNA, 80 bp, synthetic construct; identical to SEQ ID NO: 30052
  source 1..80: mol_type = other DNA

SEQ ID NO: 64490 - DNA, 80 bp, synthetic construct; identical to SEQ ID NO: 11411
  source 1..80: mol_type = other DNA

SEQ ID NO: 64491 - DNA, 80 bp, synthetic construct; identical to SEQ ID NO: 30054
  source 1..80: mol_type = other DNA

SEQ ID NO: 64492 - DNA, 80 bp, synthetic construct; identical to SEQ ID NO: 30055
  source 1..80: mol_type = other DNA

SEQ ID NO: 64493 - DNA, 80 bp, synthetic construct; identical to SEQ ID NO: 30056
  source 1..80: mol_type = other DNA

SEQ ID NO: 64494 - DNA, 80 bp, synthetic construct; identical to SEQ ID NO: 30057
  source 1..80: mol_type = other DNA

SEQ ID NO: 64495 - DNA, 80 bp, synthetic construct; identical to SEQ ID NO: 11412
  source 1..80: mol_type = other DNA

SEQ ID NO: 64496 - DNA, 80 bp, synthetic construct; identical to SEQ ID NO: 30059
  source 1..80: mol_type = other DNA

SEQ ID NO: 64497 - DNA, 80 bp, synthetic construct; identical to SEQ ID NO: 30060
  source 1..80: mol_type = other DNA

SEQ ID NO: 64498 - DNA, 80 bp, synthetic construct; identical to SEQ ID NO: 30061
  source 1..80: mol_type = other DNA

SEQ ID NO: 64499 - DNA, 80 bp, synthetic construct; identical to SEQ ID NO: 11413
  source 1..80: mol_type = other DNA

SEQ ID NO: 64500 - DNA, 80 bp, synthetic construct; identical to SEQ ID NO: 30063
  source 1..80: mol_type = other DNA

SEQ ID NO: 64501 - DNA, 80 bp, synthetic construct; identical to SEQ ID NO: 30064
  source 1..80: mol_type = other DNA

SEQ ID NO: 64502 - DNA, 80 bp, synthetic construct; identical to SEQ ID NO: 11414
  source 1..80: mol_type = other DNA

SEQ ID NO: 64503 - DNA, 80 bp, synthetic construct; identical to SEQ ID NO: 30066
  source 1..80: mol_type = other DNA

SEQ ID NO: 64504 - DNA, 80 bp, synthetic construct; identical to SEQ ID NO: 30067
  source 1..80: mol_type = other DNA

SEQ ID NO: 64505 - DNA, 80 bp, synthetic construct; identical to SEQ ID NO: 30068
  source 1..80: mol_type = other DNA

SEQ ID NO: 64506 - DNA, 80 bp, synthetic construct; identical to SEQ ID NO: 30069
  source 1..80: mol_type = other DNA

SEQ ID NO: 64507 - DNA, 80 bp, synthetic construct; identical to SEQ ID NO: 11415
  source 1..80: mol_type = other DNA

SEQ ID NO: 64508 - DNA, 80 bp, synthetic construct; identical to SEQ ID NO: 30071
  source 1..80: mol_type = other DNA

SEQ ID NO: 64509 - DNA, 80 bp, synthetic construct; identical to SEQ ID NO: 30072
  source 1..80: mol_type = other DNA

SEQ ID NO: 64510 - DNA, 80 bp, synthetic construct; identical to SEQ ID NO: 11416
  source 1..80: mol_type = other DNA

SEQ ID NO: 64511 - DNA, 80 bp, synthetic construct; identical to SEQ ID NO: 30074
  source 1..80: mol_type = other DNA

SEQ ID NO: 64512 - DNA, 80 bp, synthetic construct; identical to SEQ ID NO: 30075
  source 1..80: mol_type = other DNA

SEQ ID NO: 64513 - DNA, 80 bp, synthetic construct; identical to SEQ ID NO: 30076
  source 1..80: mol_type = other DNA

SEQ ID NO: 64514 - DNA, 80 bp, synthetic construct; identical to SEQ ID NO: 30077
  source 1..80: mol_type = other DNA

SEQ ID NO: 64515 - DNA, 80 bp, synthetic construct; identical to SEQ ID NO: 11417
  source 1..80: mol_type = other DNA

SEQ ID NO: 64516 - DNA, 80 bp, synthetic construct; identical to SEQ ID NO: 30079
  source 1..80: mol_type = other DNA

SEQ ID NO: 64517 - DNA, 80 bp, synthetic construct; identical to SEQ ID NO: 30080
  source 1..80: mol_type = other DNA

SEQ ID NO: 64518 - DNA, 80 bp, synthetic construct; identical to SEQ ID NO: 30081
  source 1..80: mol_type = other DNA

SEQ ID NO: 64519 - DNA, 80 bp, synthetic construct; identical to SEQ ID NO: 11418
  source 1..80: mol_type = other DNA

SEQ ID NO: 64520 - DNA, 80 bp, synthetic construct; identical to SEQ ID NO: 30083
  source 1..80: mol_type = other DNA

SEQ ID NO: 64521 - DNA, 80 bp, synthetic construct; identical to SEQ ID NO: 30084
  source 1..80: mol_type = other DNA

SEQ ID NO: 64522 - DNA, 80 bp, synthetic construct; identical to SEQ ID NO: 30085
  source 1..80: mol_type = other DNA

SEQ ID NO: 64523 - DNA, 80 bp, synthetic construct; identical to SEQ ID NO: 11419
  source 1..80: mol_type = other DNA

SEQ ID NO: 64524 - DNA, 80 bp, synthetic construct; identical to SEQ ID NO: 30087
  source 1..80: mol_type = other DNA

SEQ ID NO: 64525 - DNA, 80 bp, synthetic construct; identical to SEQ ID NO: 30088
  source 1..80: mol_type = other DNA

SEQ ID NO: 64526 - DNA, 80 bp, synthetic construct; identical to SEQ ID NO: 30089
  source 1..80: mol_type = other DNA

SEQ ID NO: 64527 - DNA, 80 bp, synthetic construct; identical to SEQ ID NO: 11420
  source 1..80: mol_type = other DNA

SEQ ID NO: 64528 - DNA, 80 bp, synthetic construct; identical to SEQ ID NO: 30091
  source 1..80: mol_type = other DNA

SEQ ID NO: 64529 - DNA, 80 bp, synthetic construct; identical to SEQ ID NO: 30092
  source 1..80: mol_type = other DNA

SEQ ID NO: 64530 - DNA, 80 bp, synthetic construct; identical to SEQ ID NO: 11421
  source 1..80: mol_type = other DNA

SEQ ID NO: 64531 - DNA, 80 bp, synthetic construct; identical to SEQ ID NO: 30094
  source 1..80: mol_type = other DNA

SEQ ID NO: 64532 - DNA, 80 bp, synthetic construct; identical to SEQ ID NO: 30095
  source 1..80: mol_type = other DNA

SEQ ID NO: 64533 - DNA, 80 bp, synthetic construct; identical to SEQ ID NO: 30096
  source 1..80: mol_type = other DNA

SEQ ID NO: 64534 - DNA, 80 bp, synthetic construct; identical to SEQ ID NO: 11422
  source 1..80: mol_type = other DNA

SEQ ID NO: 64535 - DNA, 80 bp, synthetic construct; identical to SEQ ID NO: 30098
  source 1..80: mol_type = other DNA

SEQ ID NO: 64536 - DNA, 80 bp, synthetic construct; identical to SEQ ID NO: 30099
  source 1..80: mol_type = other DNA

SEQ ID NO: 64537 - DNA, 80 bp, synthetic construct; identical to SEQ ID NO: 30100
  source 1..80: mol_type = other DNA

SEQ ID NO: 64538 - DNA, 80 bp, synthetic construct; identical to SEQ ID NO: 30101
  source 1..80: mol_type = other DNA

SEQ ID NO: 64539 - DNA, 80 bp, synthetic construct; identical to SEQ ID NO: 11423
  source 1..80: mol_type = other DNA

SEQ ID NO: 64540 - DNA, 80 bp, synthetic construct; identical to SEQ ID NO: 30103
  source 1..80: mol_type = other DNA

SEQ ID NO: 64541 - DNA, 80 bp, synthetic construct; identical to SEQ ID NO: 30104
  source 1..80: mol_type = other DNA

SEQ ID NO: 64542 - DNA, 80 bp, synthetic construct; identical to SEQ ID NO: 11424
  source 1..80: mol_type = other DNA

SEQ ID NO: 64543 - DNA, 80 bp, synthetic construct; identical to SEQ ID NO: 30106
  source 1..80: mol_type = other DNA

SEQ ID NO: 64544 - DNA, 80 bp, synthetic construct; identical to SEQ ID NO: 30107
  source 1..80: mol_type = other DNA

SEQ ID NO: 64545 - DNA, 80 bp, synthetic construct; identical to SEQ ID NO: 30108
  source 1..80: mol_type = other DNA

SEQ ID NO: 64546 - DNA, 80 bp, synthetic construct; identical to SEQ ID NO: 11425
  source 1..80: mol_type = other DNA

SEQ ID NO: 64547 - DNA, 80 bp, synthetic construct; identical to SEQ ID NO: 30110
  source 1..80: mol_type = other DNA

SEQ ID NO: 64548 - DNA, 80 bp, synthetic construct; identical to SEQ ID NO: 30111
  source 1..80: mol_type = other DNA

SEQ ID NO: 64549 - DNA, 80 bp, synthetic construct; identical to SEQ ID NO: 30112
  source 1..80: mol_type = other DNA

SEQ ID NO: 64550 - DNA, 80 bp, synthetic construct; identical to SEQ ID NO: 11426
  source 1..80: mol_type = other DNA

SEQ ID NO: 64551 - DNA, 80 bp, synthetic construct; identical to SEQ ID NO: 30114
  source 1..80: mol_type = other DNA

SEQ ID NO: 64552 - DNA, 80 bp, synthetic construct; identical to SEQ ID NO: 30115
  source 1..80: mol_type = other DNA

SEQ ID NO: 64553 - DNA, 80 bp, synthetic construct; identical to SEQ ID NO: 30116
  source 1..80: mol_type = other DNA

SEQ ID NO: 64554 - DNA, 80 bp, synthetic construct; identical to SEQ ID NO: 30117
  source 1..80: mol_type = other DNA

SEQ ID NO: 64555 - DNA, 80 bp, synthetic construct; identical to SEQ ID NO: 11427
  source 1..80: mol_type = other DNA

SEQ ID NO: 64556 - DNA, 80 bp, synthetic construct; identical to SEQ ID NO: 30119
  source 1..80: mol_type = other DNA

SEQ ID NO: 64557 - DNA, 80 bp, synthetic construct; identical to SEQ ID NO: 30120
  source 1..80: mol_type = other DNA

SEQ ID NO: 64558 - DNA, 80 bp, synthetic construct; identical to SEQ ID NO: 30121
  source 1..80: mol_type = other DNA

SEQ ID NO: 64559 - DNA, 80 bp, synthetic construct; identical to SEQ ID NO: 11428
  source 1..80: mol_type = other DNA

SEQ ID NO: 64560 - DNA, 80 bp, synthetic construct; identical to SEQ ID NO: 30123
  source 1..80: mol_type = other DNA

SEQ ID NO: 64561 - DNA, 80 bp, synthetic construct; identical to SEQ ID NO: 30124
  source 1..80: mol_type = other DNA

SEQ ID NO: 64562 - DNA, 80 bp, synthetic construct; identical to SEQ ID NO: 11429
  source 1..80: mol_type = other DNA

SEQ ID NO: 64563 - DNA, 80 bp, synthetic construct; identical to SEQ ID NO: 30127
  source 1..80: mol_type = other DNA

SEQ ID NO: 64564 - DNA, 80 bp, synthetic construct; identical to SEQ ID NO: 30128
  source 1..80: mol_type = other DNA

SEQ ID NO: 64565 - DNA, 80 bp, synthetic construct; identical to SEQ ID NO: 11430
  source 1..80: mol_type = other DNA

SEQ ID NO: 64566 - DNA, 80 bp, synthetic construct; identical to SEQ ID NO: 30130
  source 1..80: mol_type = other DNA

SEQ ID NO: 64567 - DNA, 80 bp, synthetic construct; identical to SEQ ID NO: 30131
  source 1..80: mol_type = other DNA

SEQ ID NO: 64568 - DNA, 80 bp, synthetic construct; identical to SEQ ID NO: 30132
  source 1..80: mol_type = other DNA

SEQ ID NO: 64569 - DNA, 80 bp, synthetic construct; identical to SEQ ID NO: 11431
  source 1..80: mol_type = other DNA

SEQ ID NO: 64570 - DNA, 80 bp, synthetic construct; identical to SEQ ID NO: 30134
  source 1..80: mol_type = other DNA

SEQ ID NO: 64571 - DNA, 80 bp, synthetic construct; identical to SEQ ID NO: 30135
  source 1..80: mol_type = other DNA

SEQ ID NO: 64572 - DNA, 80 bp, synthetic construct; identical to SEQ ID NO: 30136
  source 1..80: mol_type = other DNA

SEQ ID NO: 64573 - DNA, 80 bp, synthetic construct; identical to SEQ ID NO: 11432
  source 1..80: mol_type = other DNA

SEQ ID NO: 64574 - DNA, 80 bp, synthetic construct; identical to SEQ ID NO: 30138
  source 1..80: mol_type = other DNA

SEQ ID NO: 64575 - DNA, 80 bp, synthetic construct; identical to SEQ ID NO: 30139
  source 1..80: mol_type = other DNA

SEQ ID NO: 64576 - DNA, 80 bp, synthetic construct; identical to SEQ ID NO: 30140
  source 1..80: mol_type = other DNA

SEQ ID NO: 64577 - DNA, 80 bp, synthetic construct; identical to SEQ ID NO: 11433
  source 1..80: mol_type = other DNA

SEQ ID NO: 64578 - DNA, 80 bp, synthetic construct; identical to SEQ ID NO: 30142
  source 1..80: mol_type = other DNA

SEQ ID NO: 64579 - DNA, 80 bp, synthetic construct; identical to SEQ ID NO: 30143
  source 1..80: mol_type = other DNA

SEQ ID NO: 64580 - DNA, 80 bp, synthetic construct; identical to SEQ ID NO: 30144
  source 1..80: mol_type = other DNA

SEQ ID NO: 64581 - DNA, 80 bp, synthetic construct; identical to SEQ ID NO: 11434
  source 1..80: mol_type = other DNA

SEQ ID NO: 64582 - DNA, 80 bp, synthetic construct; identical to SEQ ID NO: 30146
  source 1..80: mol_type = other DNA

SEQ ID NO: 64583 - DNA, 80 bp, synthetic construct; identical to SEQ ID NO: 30147
  source 1..80: mol_type = other DNA

SEQ ID NO: 64584 - DNA, 80 bp, synthetic construct; identical to SEQ ID NO: 30148
  source 1..80: mol_type = other DNA

SEQ ID NO: 64585 - DNA, 80 bp, synthetic construct; identical to SEQ ID NO: 11435
  source 1..80: mol_type = other DNA

SEQ ID NO: 64586 - DNA, 80 bp, synthetic construct; identical to SEQ ID NO: 30150
  source 1..80: mol_type = other DNA

SEQ ID NO: 64587 - DNA, 80 bp, synthetic construct; identical to SEQ ID NO: 30151
  source 1..80: mol_type = other DNA

SEQ ID NO: 64588 - DNA, 80 bp, synthetic construct; identical to SEQ ID NO: 30152
  source 1..80: mol_type = other DNA

SEQ ID NO: 64589 - DNA, 80 bp, synthetic construct; identical to SEQ ID NO: 30153
  source 1..80: mol_type = other DNA

SEQ ID NO: 64590 - DNA, 80 bp, synthetic construct; identical to SEQ ID NO: 11436
  source 1..80: mol_type = other DNA

SEQ ID NO: 64591 - DNA, 80 bp, synthetic construct; identical to SEQ ID NO: 30155
  source 1..80: mol_type = other DNA

SEQ ID NO: 64592 - DNA, 80 bp, synthetic construct; identical to SEQ ID NO: 30156
  source 1..80: mol_type = other DNA

SEQ ID NO: 64593 - DNA, 80 bp, synthetic construct; identical to SEQ ID NO: 30157
  source 1..80: mol_type = other DNA

SEQ ID NO: 64594 - DNA, 80 bp, synthetic construct; identical to SEQ ID NO: 11437
  source 1..80: mol_type = other DNA

SEQ ID NO: 64595 - DNA, 80 bp, synthetic construct; identical to SEQ ID NO: 30159
  source 1..80: mol_type = other DNA

SEQ ID NO: 64596 - DNA, 80 bp, synthetic construct; identical to SEQ ID NO: 30160
  source 1..80: mol_type = other DNA

SEQ ID NO: 64597 - DNA, 80 bp, synthetic construct; identical to SEQ ID NO: 30161
  source 1..80: mol_type = other DNA

SEQ ID NO: 64598 - DNA, 80 bp, synthetic construct; identical to SEQ ID NO: 30162
  source 1..80: mol_type = other DNA

SEQ ID NO: 64599 - DNA, 80 bp, synthetic construct; identical to SEQ ID NO: 11438
  source 1..80: mol_type = other DNA

SEQ ID NO: 64600 - DNA, 80 bp, synthetic construct; identical to SEQ ID NO: 30164
  source 1..80: mol_type = other DNA

SEQ ID NO: 64601 - DNA, 80 bp, synthetic construct; identical to SEQ ID NO: 30165
  source 1..80: mol_type = other DNA

SEQ ID NO: 64602 - DNA, 80 bp, synthetic construct; identical to SEQ ID NO: 30166
  source 1..80: mol_type = other DNA

SEQ ID NO: 64603 - DNA, 80 bp, synthetic construct; identical to SEQ ID NO: 11439
  source 1..80: mol_type = other DNA

SEQ ID NO: 64604 - DNA, 80 bp, synthetic construct; identical to SEQ ID NO: 30168
  source 1..80: mol_type = other DNA

SEQ ID NO: 64605 - DNA, 80 bp, synthetic construct; identical to SEQ ID NO: 30169
  source 1..80: mol_type = other DNA

SEQ ID NO: 64606 - DNA, 80 bp, synthetic construct; identical to SEQ ID NO: 11440
  source 1..80: mol_type = other DNA

SEQ ID NO: 64607 - DNA, 80 bp, synthetic construct; identical to SEQ ID NO: 30171
  source 1..80: mol_type = other DNA

SEQ ID NO: 64608 - DNA, 80 bp, synthetic construct; identical to SEQ ID NO: 30172
  source 1..80: mol_type = other DNA

SEQ ID NO: 64609 - DNA, 80 bp, synthetic construct; identical to SEQ ID NO: 30173
  source 1..80: mol_type = other DNA

SEQ ID NO: 64610 - DNA, 80 bp, synthetic construct; identical to SEQ ID NO: 30174
  source 1..80: mol_type = other DNA

SEQ ID NO: 64611 - DNA, 80 bp, synthetic construct; identical to SEQ ID NO: 11441
  source 1..80: mol_type = other DNA

SEQ ID NO: 64612 - DNA, 80 bp, synthetic construct; identical to SEQ ID NO: 30176
  source 1..80: mol_type = other DNA

SEQ ID NO: 64613 - DNA, 80 bp, synthetic construct; identical to SEQ ID NO: 30177
  source 1..80: mol_type = other DNA

SEQ ID NO: 64614 - DNA, 80 bp, synthetic construct; identical to SEQ ID NO: 30178
  source 1..80: mol_type = other DNA

SEQ ID NO: 64615 - DNA, 80 bp, synthetic construct; identical to SEQ ID NO: 11442
  source 1..80: mol_type = other DNA

SEQ ID NO: 64616 - DNA, 80 bp, synthetic construct; identical to SEQ ID NO: 30180
  source 1..80: mol_type = other DNA

SEQ ID NO: 64617 - DNA, 80 bp, synthetic construct; identical to SEQ ID NO: 30181
  source 1..80: mol_type = other DNA

SEQ ID NO: 64618 - DNA, 80 bp, synthetic construct; identical to SEQ ID NO: 11443
  source 1..80: mol_type = other DNA

SEQ ID NO: 64619 - DNA, 80 bp, synthetic construct; identical to SEQ ID NO: 30183
  source 1..80: mol_type = other DNA

SEQ ID NO: 64620 - DNA, 80 bp, synthetic construct; identical to SEQ ID NO: 30184
  source 1..80: mol_type = other DNA

SEQ ID NO: 64621 - DNA, 80 bp, synthetic construct; identical to SEQ ID NO: 30185
  source 1..80: mol_type = other DNA

SEQ ID NO: 64622 - DNA, 80 bp, synthetic construct; identical to SEQ ID NO: 11444
  source 1..80: mol_type = other DNA

SEQ ID NO: 64623 - DNA, 80 bp, synthetic construct; identical to SEQ ID NO: 30187
  source 1..80: mol_type = other DNA

SEQ ID NO: 64624 - DNA, 80 bp, synthetic construct; identical to SEQ ID NO: 30188
  source 1..80: mol_type = other DNA

SEQ ID NO: 64625 - DNA, 80 bp, synthetic construct; identical to SEQ ID NO: 30189
  source 1..80: mol_type = other DNA

SEQ ID NO: 64626 - DNA, 80 bp, synthetic construct; identical to SEQ ID NO: 11445
  source 1..80: mol_type = other DNA

SEQ ID NO: 64627 - DNA, 80 bp, synthetic construct; identical to SEQ ID NO: 30191
  source 1..80: mol_type = other DNA

SEQ ID NO: 64628 - DNA, 80 bp, synthetic construct; identical to SEQ ID NO: 30192
  source 1..80: mol_type = other DNA

SEQ ID NO: 64629 - DNA, 80 bp, synthetic construct; identical to SEQ ID NO: 30193
  source 1..80: mol_type = other DNA

SEQ ID NO: 64630 - DNA, 80 bp, synthetic construct; identical to SEQ ID NO: 30194
  source 1..80: mol_type = other DNA

SEQ ID NO: 64631 - DNA, 80 bp, synthetic construct; identical to SEQ ID NO: 11446
  source 1..80: mol_type = other DNA

SEQ ID NO: 64632 - DNA, 80 bp, synthetic construct; identical to SEQ ID NO: 30196
  source 1..80: mol_type = other DNA

SEQ ID NO: 64633 - DNA, 80 bp, synthetic construct; identical to SEQ ID NO: 30197
  source 1..80: mol_type = other DNA

SEQ ID NO: 64634 - DNA, 80 bp, synthetic construct; identical to SEQ ID NO: 11447
  source 1..80: mol_type = other DNA

SEQ ID NO: 64635 - DNA, 80 bp, synthetic construct; identical to SEQ ID NO: 30199
  source 1..80: mol_type = other DNA

SEQ ID NO: 64636 - DNA, 80 bp, synthetic construct; identical to SEQ ID NO: 30200
  source 1..80: mol_type = other DNA

SEQ ID NO: 64637 - DNA, 80 bp, synthetic construct; identical to SEQ ID NO: 30201
  source 1..80: mol_type = other DNA

SEQ ID NO: 64638 - DNA, 80 bp, synthetic construct; identical to SEQ ID NO: 30202
  source 1..80: mol_type = other DNA

SEQ ID NO: 64639 - DNA, 80 bp, synthetic construct; identical to SEQ ID NO: 11448
  source 1..80: mol_type = other DNA

SEQ ID NO: 64640 - DNA, 80 bp, synthetic construct; identical to SEQ ID NO: 30204
  source 1..80: mol_type = other DNA

SEQ ID NO: 64641 - DNA, 80 bp, synthetic construct; identical to SEQ ID NO: 30205
  source 1..80: mol_type = other DNA

SEQ ID NO: 64642 - DNA, 80 bp, synthetic construct; identical to SEQ ID NO: 11449
  source 1..80: mol_type = other DNA

SEQ ID NO: 64643 - DNA, 80 bp, synthetic construct; identical to SEQ ID NO: 30207
  source 1..80: mol_type = other DNA

SEQ ID NO: 64644 - DNA, 80 bp, synthetic construct; identical to SEQ ID NO: 30208
  source 1..80: mol_type = other DNA

SEQ ID NO: 64645 - DNA, 80 bp, synthetic construct; identical to SEQ ID NO: 30209
  source 1..80: mol_type = other DNA

SEQ ID NO: 64646 - DNA, 80 bp, synthetic construct; identical to SEQ ID NO: 11450
  source 1..80: mol_type = other DNA

SEQ ID NO: 64647 - DNA, 80 bp, synthetic construct; identical to SEQ ID NO: 30211
  source 1..80: mol_type = other DNA

SEQ ID NO: 64648 - DNA, 80 bp, synthetic construct; identical to SEQ ID NO: 30212
  source 1..80: mol_type = other DNA

SEQ ID NO: 64649 - DNA, 80 bp, synthetic construct; identical to SEQ ID NO: 30213
  source 1..80: mol_type = other DNA

SEQ ID NO: 64650 - DNA, 80 bp, synthetic construct; identical to SEQ ID NO: 11451
  source 1..80: mol_type = other DNA

SEQ ID NO: 64651 - DNA, 80 bp, synthetic construct; identical to SEQ ID NO: 30215
  source 1..80: mol_type = other DNA

SEQ ID NO: 64652 - DNA, 80 bp, synthetic construct; identical to SEQ ID NO: 30216
  source 1..80: mol_type = other DNA

SEQ ID NO: 64653 - DNA, 80 bp, synthetic construct; identical to SEQ ID NO: 30217
  source 1..80: mol_type = other DNA

SEQ ID NO: 64654 - DNA, 80 bp, synthetic construct; identical to SEQ ID NO: 11452
  source 1..80: mol_type = other DNA

SEQ ID NO: 64655 - DNA, 80 bp, synthetic construct; identical to SEQ ID NO: 30219
  source 1..80: mol_type = other DNA

SEQ ID NO: 64656 - DNA, 80 bp, synthetic construct; identical to SEQ ID NO: 30220
  source 1..80: mol_type = other DNA

SEQ ID NO: 64657 - DNA, 80 bp, synthetic construct; identical to SEQ ID NO: 30221
  source 1..80: mol_type = other DNA

SEQ ID NO: 64658 - DNA, 80 bp, synthetic construct; identical to SEQ ID NO: 11453
  source 1..80: mol_type = other DNA

SEQ ID NO: 64659 - DNA, 80 bp, synthetic construct; identical to SEQ ID NO: 30224
  source 1..80: mol_type = other DNA

SEQ ID NO: 64660 - DNA, 80 bp, synthetic construct; identical to SEQ ID NO: 30225
  source 1..80: mol_type = other DNA

SEQ ID NO: 64661 - DNA, 80 bp, synthetic construct; identical to SEQ ID NO: 30226
  source 1..80: mol_type = other DNA

SEQ ID NO: 64662 - DNA, 80 bp, synthetic construct; identical to SEQ ID NO: 11454
  source 1..80: mol_type = other DNA

SEQ ID NO: 64663 - DNA, 80 bp, synthetic construct; identical to SEQ ID NO: 30228
  source 1..80: mol_type = other DNA

SEQ ID NO: 64664 - DNA, 80 bp, synthetic construct; identical to SEQ ID NO: 30229
  source 1..80: mol_type = other DNA

SEQ ID NO: 64665 - DNA, 80 bp, synthetic construct; identical to SEQ ID NO: 11455
  source 1..80: mol_type = other DNA

SEQ ID NO: 64666 - DNA, 80 bp, synthetic construct; identical to SEQ ID NO: 30231
  source 1..80: mol_type = other DNA

SEQ ID NO: 64667 - DNA, 80 bp, synthetic construct; identical to SEQ ID NO: 30232
  source 1..80: mol_type = other DNA

SEQ ID NO: 64668 - DNA, 80 bp, synthetic construct; identical to SEQ ID NO: 30233
  source 1..80: mol_type = other DNA

SEQ ID NO: 64669 - DNA, 80 bp, synthetic construct; identical to SEQ ID NO: 11456
  source 1..80: mol_type = other DNA

SEQ ID NO: 64670 - DNA, 80 bp, synthetic construct; identical to SEQ ID NO: 30235
  source 1..80: mol_type = other DNA

SEQ ID NO: 64671 - DNA, 80 bp, synthetic construct; identical to SEQ ID NO: 30237
  source 1..80: mol_type = other DNA

SEQ ID NO: 64672 - DNA, 80 bp, synthetic construct; identical to SEQ ID NO: 30238
  source 1..80: mol_type = other DNA

SEQ ID NO: 64673 - DNA, 80 bp, synthetic construct; identical to SEQ ID NO: 11457
  source 1..80: mol_type = other DNA

SEQ ID NO: 64674 - DNA, 80 bp, synthetic construct; identical to SEQ ID NO: 30240
  source 1..80: mol_type = other DNA

SEQ ID NO: 64675 - DNA, 80 bp, synthetic construct; identical to SEQ ID NO: 30241
  source 1..80: mol_type = other DNA

SEQ ID NO: 64676 - DNA, 80 bp, synthetic construct; identical to SEQ ID NO: 11458
  source 1..80: mol_type = other DNA

SEQ ID NO: 64677 - DNA, 80 bp, synthetic construct; identical to SEQ ID NO: 30243
  source 1..80: mol_type = other DNA

SEQ ID NO: 64678 - DNA, 80 bp, synthetic construct; identical to SEQ ID NO: 30244
  source 1..80: mol_type = other DNA

SEQ ID NO: 64679 - DNA, 80 bp, synthetic construct; identical to SEQ ID NO: 30245
  source 1..80: mol_type = other DNA

SEQ ID NO: 64680 - DNA, 80 bp, synthetic construct; identical to SEQ ID NO: 30246
  source 1..80: mol_type = other DNA

SEQ ID NO: 64681 - DNA, 80 bp, synthetic construct; identical to SEQ ID NO: 11459
  source 1..80: mol_type = other DNA

SEQ ID NO: 64682 - DNA, 80 bp, synthetic construct; identical to SEQ ID NO: 30248
  source 1..80: mol_type = other DNA

SEQ ID NO: 64683 - DNA, 80 bp, synthetic construct; identical to SEQ ID NO: 30249
  source 1..80: mol_type = other DNA

SEQ ID NO: 64684 - DNA, 80 bp, synthetic construct; identical to SEQ ID NO: 30250
  source 1..80: mol_type = other DNA

SEQ ID NO: 64685 - DNA, 80 bp, synthetic construct; identical to SEQ ID NO: 11460
  source 1..80: mol_type = other DNA

SEQ ID NO: 64686 - DNA, 80 bp, synthetic construct; identical to SEQ ID NO: 30252
  source 1..80: mol_type = other DNA

SEQ ID NO: 64687 - DNA, 80 bp, synthetic construct; identical to SEQ ID NO: 30253
  source 1..80: mol_type = other DNA

SEQ ID NO: 64688 - DNA, 80 bp, synthetic construct; identical to SEQ ID NO: 30254
  source 1..80: mol_type = other DNA

SEQ ID NO: 64689 - DNA, 80 bp, synthetic construct; identical to SEQ ID NO: 11461
  source 1..80: mol_type = other DNA

SEQ ID NO: 64690 - DNA, 80 bp, synthetic construct; identical to SEQ ID NO: 30256
  source 1..80: mol_type = other DNA

SEQ ID NO: 64691 - DNA, 80 bp, synthetic construct; identical to SEQ ID NO: 30257
  source 1..80: mol_type = other DNA

SEQ ID NO: 64692 - DNA, 80 bp, synthetic construct; identical to SEQ ID NO: 30258
  source 1..80: mol_type = other DNA

SEQ ID NO: 64693 - DNA, 80 bp, synthetic construct; identical to SEQ ID NO: 11462
  source 1..80: mol_type = other DNA

SEQ ID NO: 64694 - DNA, 80 bp, synthetic construct; identical to SEQ ID NO: 30260
  source 1..80: mol_type = other DNA

SEQ ID NO: 64695 - DNA, 80 bp, synthetic construct; identical to SEQ ID NO: 30261
  source 1..80: mol_type = other DNA

SEQ ID NO: 64696 - DNA, 80 bp, synthetic construct; identical to SEQ ID NO: 30262
  source 1..80: mol_type = other DNA

SEQ ID NO: 64697 - DNA, 80 bp, synthetic construct; identical to SEQ ID NO: 11463
  source 1..80: mol_type = other DNA

SEQ ID NO: 64698 - DNA, 80 bp, synthetic construct; identical to SEQ ID NO: 30264
  source 1..80: mol_type = other DNA

SEQ ID NO: 64699 - DNA, 80 bp, synthetic construct; identical to SEQ ID NO: 30265
  source 1..80: mol_type = other DNA

SEQ ID NO: 64700 - DNA, 80 bp, synthetic construct; identical to SEQ ID NO: 11464
  source 1..80: mol_type = other DNA

SEQ ID NO: 64701 - DNA, 80 bp, synthetic construct; identical to SEQ ID NO: 30268
  source 1..80: mol_type = other DNA

SEQ ID NO: 64702 - DNA, 80 bp, synthetic construct; identical to SEQ ID NO: 30269
  source 1..80: mol_type = other DNA

SEQ ID NO: 64703 - DNA, 80 bp, synthetic construct; identical to SEQ ID NO: 30270
  source 1..80: mol_type = other DNA

SEQ ID NO: 64704 - DNA, 80 bp, synthetic construct; identical to SEQ ID NO: 11465
  source 1..80: mol_type = other DNA

SEQ ID NO: 64705 - DNA, 80 bp, synthetic construct; identical to SEQ ID NO: 30272
  source 1..80: mol_type = other DNA

SEQ ID NO: 64706 - DNA, 80 bp, synthetic construct; identical to SEQ ID NO: 30273
  source 1..80: mol_type = other DNA

SEQ ID NO: 64707 - DNA, 80 bp, synthetic construct; identical to SEQ ID NO: 30274
  source 1..80: mol_type = other DNA

SEQ ID NO: 64708 - DNA, 80 bp, synthetic construct; identical to SEQ ID NO: 30277
  source 1..80: mol_type = other DNA

SEQ ID NO: 64709 - DNA, 80 bp, synthetic construct; identical to SEQ ID NO: 30278
  source 1..80: mol_type = other DNA

SEQ ID NO: 64710 - DNA, 80 bp, synthetic construct; identical to SEQ ID NO: 30279
  source 1..80: mol_type = other DNA

SEQ ID NO: 64711 - DNA, 80 bp, synthetic construct; identical to SEQ ID NO: 11467
  source 1..80: mol_type = other DNA

SEQ ID NO: 64712 - DNA, 80 bp, synthetic construct; identical to SEQ ID NO: 30281
  source 1..80: mol_type = other DNA

SEQ ID NO: 64713 - DNA, 80 bp, synthetic construct; identical to SEQ ID NO: 30282
  source 1..80: mol_type = other DNA

SEQ ID NO: 64714 - DNA, 80 bp, synthetic construct; identical to SEQ ID NO: 11468
  source 1..80: mol_type = other DNA

SEQ ID NO: 64715 - DNA, 80 bp, synthetic construct; identical to SEQ ID NO: 30284
  source 1..80: mol_type = other DNA

SEQ ID NO: 64716 - DNA, 80 bp, synthetic construct; identical to SEQ ID NO: 30285
  source 1..80: mol_type = other DNA

SEQ ID NO: 64717 - DNA, 80 bp, synthetic construct; identical to SEQ ID NO: 30286
  source 1..80: mol_type = other DNA

SEQ ID NO: 64718 - DNA, 80 bp, synthetic construct; identical to SEQ ID NO: 30287
  source 1..80: mol_type = other DNA

SEQ ID NO: 64719 - DNA, 80 bp, synthetic construct; identical to SEQ ID NO: 11469
  source 1..80: mol_type = other DNA

SEQ ID NO: 64720 - DNA, 80 bp, synthetic construct; identical to SEQ ID NO: 30289
  source 1..80: mol_type = other DNA

SEQ ID NO: 64721 - DNA, 80 bp, synthetic construct; identical to SEQ ID NO: 30290
  source 1..80: mol_type = other DNA

SEQ ID NO: 64722 - DNA, 80 bp, synthetic construct; identical to SEQ ID NO: 11470
  source 1..80: mol_type = other DNA

SEQ ID NO: 64723 - DNA, 80 bp, synthetic construct; identical to SEQ ID NO: 30292
  source 1..80: mol_type = other DNA

SEQ ID NO: 64724 - DNA, 80 bp, synthetic construct; identical to SEQ ID NO: 30293
  source 1..80: mol_type = other DNA

SEQ ID NO: 64725 - DNA, 80 bp, synthetic construct; identical to SEQ ID NO: 30294
  source 1..80: mol_type = other DNA

SEQ ID NO: 64726 - DNA, 80 bp, synthetic construct; identical to SEQ ID NO: 11471
  source 1..80: mol_type = other DNA

SEQ ID NO: 64727 - DNA, 80 bp, synthetic construct; identical to SEQ ID NO: 30296
  source 1..80: mol_type = other DNA

SEQ ID NO: 64728 - DNA, 80 bp, synthetic construct; identical to SEQ ID NO: 30298
  source 1..80: mol_type = other DNA

SEQ ID NO: 64729 - DNA, 80 bp, synthetic construct; identical to SEQ ID NO: 30299
  source 1..80: mol_type = other DNA

SEQ ID NO: 64730 - DNA, 80 bp, synthetic construct; identical to SEQ ID NO: 11472
  source 1..80: mol_type = other DNA

SEQ ID NO: 64731 - DNA, 80 bp, synthetic construct; identical to SEQ ID NO: 30301
  source 1..80: mol_type = other DNA

SEQ ID NO: 64732 - DNA, 80 bp, synthetic construct; identical to SEQ ID NO: 30302
  source 1..80: mol_type = other DNA

SEQ ID NO: 64733 - DNA, 80 bp, synthetic construct; identical to SEQ ID NO: 30303
  source 1..80: mol_type = other DNA

SEQ ID NO: 64734 - DNA, 80 bp, synthetic construct; identical to SEQ ID NO: 11473
  source 1..80: mol_type = other DNA

SEQ ID NO: 64735 - DNA, 80 bp, synthetic construct; identical to SEQ ID NO: 30305
  source 1..80: mol_type = other DNA

SEQ ID NO: 64736 - DNA, 80 bp, synthetic construct; identical to SEQ ID NO: 30306
  source 1..80: mol_type = other DNA

SEQ ID NO: 64737 - DNA, 80 bp, synthetic construct; identical to SEQ ID NO: 30307
  source 1..80: mol_type = other DNA

SEQ ID NO: 64738 - DNA, 80 bp, synthetic construct; identical to SEQ ID NO: 11474
  source 1..80: mol_type = other DNA

SEQ ID NO: 64739 - DNA, 80 bp, synthetic construct; identical to SEQ ID NO: 30309
  source 1..80: mol_type = other DNA

SEQ ID NO: 64740 - DNA, 80 bp, synthetic construct; identical to SEQ ID NO: 30310
  source 1..80: mol_type = other DNA

SEQ ID NO: 64741 - DNA, 80 bp, synthetic construct; identical to SEQ ID NO: 11475
  source 1..80: mol_type = other DNA

SEQ ID NO: 64742 - DNA, 80 bp, synthetic construct; identical to SEQ ID NO: 30312
  source 1..80: mol_type = other DNA

SEQ ID NO: 64743 - DNA, 80 bp, synthetic construct; identical to SEQ ID NO: 30313
  source 1..80: mol_type = other DNA

SEQ ID NO: 64744 - DNA, 80 bp, synthetic construct; identical to SEQ ID NO: 30314
  source 1..80: mol_type = other DNA

SEQ ID NO: 64745 - DNA, 80 bp, synthetic construct; identical to SEQ ID NO: 11476
  source 1..80: mol_type = other DNA

SEQ ID NO: 64746 - DNA, 80 bp, synthetic construct; identical to SEQ ID NO: 30316
  source 1..80: mol_type = other DNA

SEQ ID NO: 64747 - DNA, 80 bp, synthetic construct; identical to SEQ ID NO: 30317
  source 1..80: mol_type = other DNA

SEQ ID NO: 64748 - DNA, 80 bp, synthetic construct; identical to SEQ ID NO: 30318
  source 1..80: mol_type = other DNA

SEQ ID NO: 64749 - DNA, 80 bp, synthetic construct; identical to SEQ ID NO: 30319
  source 1..80: mol_type = other DNA

SEQ ID NO: 64750 - DNA, 80 bp, synthetic construct; identical to SEQ ID NO: 11477
  source 1..80: mol_type = other DNA

SEQ ID NO: 64751 - DNA, 80 bp, synthetic construct; identical to SEQ ID NO: 30321
  source 1..80: mol_type = other DNA

SEQ ID NO: 64752 - DNA, 80 bp, synthetic construct; identical to SEQ ID NO: 30322
  source 1..80: mol_type = other DNA

SEQ ID NO: 64753 - DNA, 80 bp, synthetic construct; identical to SEQ ID NO: 11478
  source 1..80: mol_type = other DNA

SEQ ID NO: 64754 - DNA, 80 bp, synthetic construct; identical to SEQ ID NO: 30325
  source 1..80: mol_type = other DNA

SEQ ID NO: 64755 - DNA, 80 bp, synthetic construct; identical to SEQ ID NO: 30326
  source 1..80: mol_type = other DNA

SEQ ID NO: 64756 - DNA, 80 bp, synthetic construct; identical to SEQ ID NO: 11479
  source 1..80: mol_type = other DNA

SEQ ID NO: 64757 - DNA, 80 bp, synthetic construct; identical to SEQ ID NO: 30329
  source 1..80: mol_type = other DNA

SEQ ID NO: 64758 - DNA, 80 bp, synthetic construct; identical to SEQ ID NO: 30330
  source 1..80: mol_type = other DNA

SEQ ID NO: 64759 - DNA, 80 bp, synthetic construct; identical to SEQ ID NO: 11480
  source 1..80: mol_type = other DNA

SEQ ID NO: 64760 - DNA, 80 bp, synthetic construct; identical to SEQ ID NO: 30332
  source 1..80: mol_type = other DNA

SEQ ID NO: 64761 - DNA, 80 bp, synthetic construct; identical to SEQ ID NO: 30333
  source 1..80: mol_type = other DNA

SEQ ID NO: 64762 - DNA, 80 bp, synthetic construct; identical to SEQ ID NO: 30334
  source 1..80: mol_type = other DNA

SEQ ID NO: 64763 - DNA, 80 bp, synthetic construct; identical to SEQ ID NO: 11481
  source 1..80: mol_type = other DNA

SEQ ID NO: 64764 - DNA, 80 bp, synthetic construct; identical to SEQ ID NO: 30337
  source 1..80: mol_type = other DNA

SEQ ID NO: 64765 - DNA, 80 bp, synthetic construct; identical to SEQ ID NO: 30338
  source 1..80: mol_type = other DNA

SEQ ID NO: 64766 - DNA, 80 bp, synthetic construct; identical to SEQ ID NO: 30339
  source 1..80: mol_type = other DNA

SEQ ID NO: 64767 - DNA, 80 bp, synthetic construct; identical to SEQ ID NO: 11482
  source 1..80: mol_type = other DNA

SEQ ID NO: 64768 - DNA, 80 bp, synthetic construct; identical to SEQ ID NO: 30341
  source 1..80: mol_type = other DNA

SEQ ID NO: 64769 - DNA, 80 bp, synthetic construct; identical to SEQ ID NO: 30343
  source 1..80: mol_type = other DNA

SEQ ID NO: 64770 - DNA, 80 bp, synthetic construct; identical to SEQ ID NO: 11483
  source 1..80: mol_type = other DNA

SEQ ID NO: 64771 - DNA, 80 bp, synthetic construct; identical to SEQ ID NO: 30345
  source 1..80: mol_type = other DNA

SEQ ID NO: 64772 - DNA, 80 bp, synthetic construct; identical to SEQ ID NO: 30346
  source 1..80: mol_type = other DNA

SEQ ID NO: 64773 - DNA, 80 bp, synthetic construct; identical to SEQ ID NO: 30347
  source 1..80: mol_type = other DNA

SEQ ID NO: 64774 - DNA, 80 bp, synthetic construct; identical to SEQ ID NO: 30348
  source 1..80: mol_type = other DNA

SEQ ID NO: 64775 - DNA, 80 bp, synthetic construct; identical to SEQ ID NO: 11484
  source 1..80: mol_type = other DNA

SEQ ID NO: 64776 - DNA, 80 bp, synthetic construct; identical to SEQ ID NO: 30350
  source 1..80: mol_type = other DNA

SEQ ID NO: 64777 - DNA, 80 bp, synthetic construct; identical to SEQ ID NO: 30351
  source 1..80: mol_type = other DNA

SEQ ID NO: 64778 - DNA, 80 bp, synthetic construct; identical to SEQ ID NO: 11485
  source 1..80: mol_type = other DNA

SEQ ID NO: 64779 - DNA, 80 bp, synthetic construct; identical to SEQ ID NO: 30353
  source 1..80: mol_type = other DNA

SEQ ID NO: 64780 - DNA, 80 bp, synthetic construct; identical to SEQ ID NO: 30354
  source 1..80: mol_type = other DNA

SEQ ID NO: 64781 - DNA, 80 bp, synthetic construct; identical to SEQ ID NO: 30355
  source 1..80: mol_type = other DNA

SEQ ID NO: 64782 - DNA, 80 bp, synthetic construct; identical to SEQ ID NO: 11486
  source 1..80: mol_type = other DNA

SEQ ID NO: 64783 - DNA, 80 bp, synthetic construct; identical to SEQ ID NO: 30357
  source 1..80: mol_type = other DNA

SEQ ID NO: 64784 - DNA, 80 bp, synthetic construct; identical to SEQ ID NO: 30358
  source 1..80: mol_type = other DNA

SEQ ID NO: 64785 - DNA, 80 bp, synthetic construct; identical to SEQ ID NO: 30359
  source 1..80: mol_type = other DNA

SEQ ID NO: 64786 - DNA, 80 bp, synthetic construct; identical to SEQ ID NO: 11487
  source 1..80: mol_type = other DNA

SEQ ID NO: 64787 - DNA, 80 bp, synthetic construct; identical to SEQ ID NO: 30361
  source 1..80: mol_type = other DNA

SEQ ID NO: 64788 - DNA, 80 bp, synthetic construct; identical to SEQ ID NO: 30362
  source 1..80: mol_type = other DNA

SEQ ID NO: 64789 - DNA, 80 bp, synthetic construct; identical to SEQ ID NO: 30363
  source 1..80: mol_type = other DNA

SEQ ID NO: 64790 - DNA, 80 bp, synthetic construct; identical to SEQ ID NO: 30364
  source 1..80: mol_type = other DNA

SEQ ID NO: 64791 - DNA, 80 bp, synthetic construct; identical to SEQ ID NO: 11488
  source 1..80: mol_type = other DNA

SEQ ID NO: 64792 - DNA, 80 bp, synthetic construct; identical to SEQ ID NO: 30366
  source 1..80: mol_type = other DNA

SEQ ID NO: 64793 - DNA, 80 bp, synthetic construct; identical to SEQ ID NO: 30367
  source 1..80: mol_type = other DNA

SEQ ID NO: 64794 - DNA, 80 bp, synthetic construct; identical to SEQ ID NO: 11489
  source 1..80: mol_type = other DNA

SEQ ID NO: 64795 - DNA, 80 bp, synthetic construct; identical to SEQ ID NO: 30369
  source 1..80: mol_type = other DNA

SEQ ID NO: 64796 - DNA, 80 bp, synthetic construct; identical to SEQ ID NO: 30370
  source 1..80: mol_type = other DNA

SEQ ID NO: 64797 - DNA, 80 bp, synthetic construct; identical to SEQ ID NO: 30371
  source 1..80: mol_type = other DNA

SEQ ID NO: 64798 - DNA, 80 bp, synthetic construct; identical to SEQ ID NO: 11490
  source 1..80: mol_type = other DNA

SEQ ID NO: 64799 - DNA, 80 bp, synthetic construct; identical to SEQ ID NO: 30373
  source 1..80: mol_type = other DNA

SEQ ID NO: 64800 - DNA, 80 bp, synthetic construct; identical to SEQ ID NO: 30374
  source 1..80: mol_type = other DNA

SEQ ID NO: 64801 - DNA, 80 bp, synthetic construct; identical to SEQ ID NO: 30375
  source 1..80: mol_type = other DNA

SEQ ID NO: 64802 - DNA, 80 bp, synthetic construct; identical to SEQ ID NO: 30376
  source 1..80: mol_type = other DNA

SEQ ID NO: 64803 - DNA, 80 bp, synthetic construct; identical to SEQ ID NO: 11491
  source 1..80: mol_type = other DNA

SEQ ID NO: 64804 - DNA, 80 bp, synthetic construct; identical to SEQ ID NO: 30378
  source 1..80: mol_type = other DNA

SEQ ID NO: 64805 - DNA, 80 bp, synthetic construct; identical to SEQ ID NO: 30379
  source 1..80: mol_type = other DNA

SEQ ID NO: 64806 - DNA, 80 bp, synthetic construct; identical to SEQ ID NO: 30380
  source 1..80: mol_type = other DNA

SEQ ID NO: 64807 - DNA, 80 bp, synthetic construct; identical to SEQ ID NO: 30381
  source 1..80: mol_type = other DNA

SEQ ID NO: 64808 - DNA, 80 bp, synthetic construct; identical to SEQ ID NO: 11492
  source 1..80: mol_type = other DNA

SEQ ID NO: 64809 - DNA, 80 bp, synthetic construct; identical to SEQ ID NO: 30383
  source 1..80: mol_type = other DNA

SEQ ID NO: 64810 - DNA, 80 bp, synthetic construct; identical to SEQ ID NO: 30384
  source 1..80: mol_type = other DNA

SEQ ID NO: 64811 - DNA, 80 bp, synthetic construct; identical to SEQ ID NO: 11493
  source 1..80: mol_type = other DNA

SEQ ID NO: 64812 - DNA, 80 bp, synthetic construct; identical to SEQ ID NO: 30387
  source 1..80: mol_type = other DNA

SEQ ID NO: 64813 - DNA, 80 bp, synthetic construct; identical to SEQ ID NO: 30388
  source 1..80: mol_type = other DNA

SEQ ID NO: 64814 - DNA, 80 bp, synthetic construct; identical to SEQ ID NO: 11494
  source 1..80: mol_type = other DNA

SEQ ID NO: 64815 - DNA, 80 bp, synthetic construct; identical to SEQ ID NO: 30390
  source 1..80: mol_type = other DNA

SEQ ID NO: 64816 - DNA, 80 bp, synthetic construct; identical to SEQ ID NO: 30392
  source 1..80: mol_type = other DNA

SEQ ID NO: 64817 - DNA, 80 bp, synthetic construct; identical to SEQ ID NO: 30393
  source 1..80: mol_type = other DNA

SEQ ID NO: 64818 - DNA, 80 bp, synthetic construct; identical to SEQ ID NO: 11495
  source 1..80: mol_type = other DNA

SEQ ID NO: 64819 - DNA, 80 bp, synthetic construct; identical to SEQ ID NO: 30395
  source 1..80: mol_type = other DNA

SEQ ID NO: 64820 - DNA, 80 bp, synthetic construct; identical to SEQ ID NO: 30396
  source 1..80: mol_type = other DNA

SEQ ID NO: 64821 - DNA, 80 bp, synthetic construct; identical to SEQ ID NO: 11496
  source 1..80: mol_type = other DNA

SEQ ID NO: 64822 - DNA, 80 bp, synthetic construct; identical to SEQ ID NO: 30399
  source 1..80: mol_type = other DNA

SEQ ID NO: 64823 - DNA, 80 bp, synthetic construct; identical to SEQ ID NO: 30400
  source 1..80: mol_type = other DNA

SEQ ID NO: 64824 - DNA, 80 bp, synthetic construct; identical to SEQ ID NO: 30401
  source 1..80: mol_type = other DNA

SEQ ID NO: 64825 - DNA, 80 bp, synthetic construct; identical to SEQ ID NO: 11497
  source 1..80: mol_type = other DNA

SEQ ID NO: 64826 - DNA, 80 bp, synthetic construct; identical to SEQ ID NO: 30403
  source 1..80: mol_type = other DNA

SEQ ID NO: 64827 - DNA, 80 bp, synthetic construct; identical to SEQ ID NO: 11498
  source 1..80: mol_type = other DNA

SEQ ID NO: 64828 - DNA, 80 bp, synthetic construct; identical to SEQ ID NO: 30406
  source 1..80: mol_type = other DNA

SEQ ID NO: 64829 - DNA, 80 bp, synthetic construct; identical to SEQ ID NO: 30407
  source 1..80: mol_type = other DNA

SEQ ID NO: 64830 - DNA, 80 bp, synthetic construct; identical to SEQ ID NO: 30408
  source 1..80: mol_type = other DNA

SEQ ID NO: 64831 - DNA, 80 bp, synthetic construct; identical to SEQ ID NO: 11499
  source 1..80: mol_type = other DNA

SEQ ID NO: 64832 - DNA, 80 bp, synthetic construct; identical to SEQ ID NO: 30410
  source 1..80: mol_type = other DNA

SEQ ID NO: 64833 - DNA, 80 bp, synthetic construct; identical to SEQ ID NO: 30411
  source 1..80: mol_type = other DNA

SEQ ID NO: 64834 - DNA, 80 bp, synthetic construct; identical to SEQ ID NO: 30412
  source 1..80: mol_type = other DNA

SEQ ID NO: 64835 - DNA, 80 bp, synthetic construct; identical to SEQ ID NO: 11500
  source 1..80: mol_type = other DNA

SEQ ID NO: 64836 - DNA, 80 bp, synthetic construct; identical to SEQ ID NO: 30415
  source 1..80: mol_type = other DNA

SEQ ID NO: 64837 - DNA, 80 bp, synthetic construct; identical to SEQ ID NO: 30416
  source 1..80: mol_type = other DNA

SEQ ID NO: 64838 - DNA, 80 bp, synthetic construct; identical to SEQ ID NO: 11501
  source 1..80: mol_type = other DNA

SEQ ID NO: 64839 - DNA, 80 bp, synthetic construct; identical to SEQ ID NO: 30418
  source 1..80: mol_type = other DNA

SEQ ID NO: 64840 - DNA, 80 bp, synthetic construct; identical to SEQ ID NO: 30419
  source 1..80: mol_type = other DNA

SEQ ID NO: 64841 - DNA, 80 bp, synthetic construct; identical to SEQ ID NO: 11502
  source 1..80: mol_type = other DNA

SEQ ID NO: 64842 - DNA, 80 bp, synthetic construct; identical to SEQ ID NO: 30423
  source 1..80: mol_type = other DNA

SEQ ID NO: 64843 - DNA, 80 bp, synthetic construct; identical to SEQ ID NO: 30424
  source 1..80: mol_type = other DNA

SEQ ID NO: 64844 - DNA, 80 bp, synthetic construct; identical to SEQ ID NO: 11503
  source 1..80: mol_type = other DNA

SEQ ID NO: 64845 - DNA, 80 bp, synthetic construct; identical to SEQ ID NO: 30426
  source 1..80: mol_type = other DNA

SEQ ID NO: 64846 - DNA, 80 bp, synthetic construct; identical to SEQ ID NO: 30427
  source 1..80: mol_type = other DNA

SEQ ID NO: 64847 - DNA, 80 bp, synthetic construct; identical to SEQ ID NO: 30428
  source 1..80: mol_type = other DNA

SEQ ID NO: 64848 - DNA, 80 bp, synthetic construct; identical to SEQ ID NO: 11504
  source 1..80: mol_type = other DNA

SEQ ID NO: 64849 - DNA, 80 bp, synthetic construct; identical to SEQ ID NO: 30431
  source 1..80: mol_type = other DNA

SEQ ID NO: 64850 - DNA, 80 bp, synthetic construct; identical to SEQ ID NO: 30432
  source 1..80: mol_type = other DNA

SEQ ID NO: 64851 - DNA, 80 bp, synthetic construct; identical to SEQ ID NO: 30433
  source 1..80: mol_type = other DNA

SEQ ID NO: 64852 - DNA, 80 bp, synthetic construct; identical to SEQ ID NO: 11505
  source 1..80: mol_type = other DNA

SEQ ID NO: 64853 - DNA, 80 bp, synthetic construct; identical to SEQ ID NO: 30435
  source 1..80: mol_type = other DNA

SEQ ID NO: 64854 - DNA, 80 bp, synthetic construct; identical to SEQ ID NO: 30436
  source 1..80: mol_type = other DNA

SEQ ID NO: 64855 - DNA, 80 bp, synthetic construct; identical to SEQ ID NO: 11506
  source 1..80: mol_type = other DNA

SEQ ID NO: 64856 - DNA, 80 bp, synthetic construct; identical to SEQ ID NO: 30439
  source 1..80: mol_type = other DNA

SEQ ID NO: 64857 - DNA, 80 bp, synthetic construct; identical to SEQ ID NO: 11507
  source 1..80: mol_type = other DNA

SEQ ID NO: 64858 - DNA, 80 bp, synthetic construct; identical to SEQ ID NO: 30442
  source 1..80: mol_type = other DNA

SEQ ID NO: 64859 - DNA, 80 bp, synthetic construct; identical to SEQ ID NO: 30443
  source 1..80: mol_type = other DNA

SEQ ID NO: 64860 - DNA, 80 bp, synthetic construct; identical to SEQ ID NO: 30444
  source 1..80: mol_type = other DNA

SEQ ID NO: 64861 - DNA, 80 bp, synthetic construct; identical to SEQ ID NO: 30445
  source 1..80: mol_type = other DNA

SEQ ID NO: 64862 - DNA, 80 bp, synthetic construct; identical to SEQ ID NO: 11508
  source 1..80: mol_type = other DNA

SEQ ID NO: 64863 - DNA, 80 bp, synthetic construct; identical to SEQ ID NO: 30447
  source 1..80: mol_type = other DNA

SEQ ID NO: 64864 - DNA, 80 bp, synthetic construct; identical to SEQ ID NO: 30448
  source 1..80: mol_type = other DNA

SEQ ID NO: 64865 - DNA, 80 bp, synthetic construct; identical to SEQ ID NO: 11509
  source 1..80: mol_type = other DNA

SEQ ID NO: 64866 - DNA, 80 bp, synthetic construct; identical to SEQ ID NO: 30450
  source 1..80: mol_type = other DNA

SEQ ID NO: 64867 - DNA, 80 bp, synthetic construct; identical to SEQ ID NO: 30451
  source 1..80: mol_type = other DNA

SEQ ID NO: 64868 - DNA, 80 bp, synthetic construct; identical to SEQ ID NO: 30452
  source 1..80: mol_type = other DNA

SEQ ID NO: 64869 - DNA, 80 bp, synthetic construct; identical to SEQ ID NO: 30453
  source 1..80: mol_type = other DNA

SEQ ID NO: 64870 - DNA, 80 bp, synthetic construct; identical to SEQ ID NO: 11510
  source 1..80: mol_type = other DNA

SEQ ID NO: 64871 - DNA, 80 bp, synthetic construct; identical to SEQ ID NO: 30455
  source 1..80: mol_type = other DNA

SEQ ID NO: 64872 - DNA, 80 bp, synthetic construct; identical to SEQ ID NO: 30456
  source 1..80: mol_type = other DNA

SEQ ID NO: 64873 - DNA, 80 bp, synthetic construct; identical to SEQ ID NO: 30457
  source 1..80: mol_type = other DNA

SEQ ID NO: 64874 - DNA, 80 bp, synthetic construct; identical to SEQ ID NO: 11511
  source 1..80: mol_type = other DNA

SEQ ID NO: 64875 - DNA, 80 bp, synthetic construct; identical to SEQ ID NO: 30459
  source 1..80: mol_type = other DNA

SEQ ID NO: 64876 - DNA, 80 bp, synthetic construct; identical to SEQ ID NO: 30460
  source 1..80: mol_type = other DNA

SEQ ID NO: 64877 - DNA, 80 bp, synthetic construct; identical to SEQ ID NO: 11512
  source 1..80: mol_type = other DNA

SEQ ID NO: 64878 - DNA, 80 bp, synthetic construct; identical to SEQ ID NO: 30462
  source 1..80: mol_type = other DNA

SEQ ID NO: 64879 - DNA, 80 bp, synthetic construct; identical to SEQ ID NO: 30463
  source 1..80: mol_type = other DNA

SEQ ID NO: 64880 - DNA, 80 bp, synthetic construct; identical to SEQ ID NO: 30464
  source 1..80: mol_type = other DNA

SEQ ID NO: 64881 - DNA, 80 bp, synthetic construct; identical to SEQ ID NO: 30465
  source 1..80: mol_type = other DNA

SEQ ID NO: 64882 - DNA, 80 bp, synthetic construct; identical to SEQ ID NO: 11513
  source 1..80: mol_type = other DNA

SEQ ID NO: 64883 - DNA, 80 bp, synthetic construct; identical to SEQ ID NO: 30467
  source 1..80: mol_type = other DNA

SEQ ID NO: 64884 - DNA, 80 bp, synthetic construct; identical to SEQ ID NO: 30468
  source 1..80: mol_type = other DNA

SEQ ID NO: 64885 - DNA, 80 bp, synthetic construct; identical to SEQ ID NO: 30469
  source 1..80: mol_type = other DNA

SEQ ID NO: 64886 - DNA, 80 bp, synthetic construct; identical to SEQ ID NO: 11514
  source 1..80: mol_type = other DNA

SEQ ID NO: 64887 - DNA, 80 bp, synthetic construct; identical to SEQ ID NO: 30471
  source 1..80: mol_type = other DNA

SEQ ID NO: 64888 - DNA, 80 bp, synthetic construct; identical to SEQ ID NO: 30472
  source 1..80: mol_type = other DNA

SEQ ID NO: 64889 - DNA, 80 bp, synthetic construct; identical to SEQ ID NO: 11515
  source 1..80: mol_type = other DNA

SEQ ID NO: 64890 - DNA, 80 bp, synthetic construct; identical to SEQ ID NO: 30474
  source 1..80: mol_type = other DNA

SEQ ID NO: 64891 - DNA, 80 bp, synthetic construct; identical to SEQ ID NO: 30475
  source 1..80: mol_type = other DNA

SEQ ID NO: 64892 - DNA, 80 bp, synthetic construct; identical to SEQ ID NO: 11516
  source 1..80: mol_type = other DNA

SEQ ID NO: 64893 - DNA, 80 bp, synthetic construct; identical to SEQ ID NO: 30478
  source 1..80: mol_type = other DNA

SEQ ID NO: 64894 - DNA, 80 bp, synthetic construct; identical to SEQ ID NO: 30479
  source 1..80: mol_type = other DNA

SEQ ID NO: 64895 - DNA, 80 bp, synthetic construct; identical to SEQ ID NO: 30480
  source 1..80: mol_type = other DNA

SEQ ID NO: 64896 - DNA, 80 bp, synthetic construct; identical to SEQ ID NO: 11517
  source 1..80: mol_type = other DNA

SEQ ID NO: 64897 - DNA, 80 bp, synthetic construct; identical to SEQ ID NO: 30482
  source 1..80: mol_type = other DNA

SEQ ID NO: 64898 - DNA, 80 bp, synthetic construct; identical to SEQ ID NO: 30483
  source 1..80: mol_type = other DNA

SEQ ID NO: 64899 - DNA, 80 bp, synthetic construct; identical to SEQ ID NO: 30484
  source 1..80: mol_type = other DNA

SEQ ID NO: 64900 - DNA, 80 bp, synthetic construct; identical to SEQ ID NO: 30485
  source 1..80: mol_type = other DNA

SEQ ID NO: 64901 - DNA, 80 bp, synthetic construct; identical to SEQ ID NO: 11518
  source 1..80: mol_type = other DNA

SEQ ID NO: 64902 - DNA, 80 bp, synthetic construct; identical to SEQ ID NO: 30487
  source 1..80: mol_type = other DNA

SEQ ID NO: 64903 - DNA, 80 bp, synthetic construct; identical to SEQ ID NO: 30488
  source 1..80: mol_type = other DNA

SEQ ID NO: 64904 - DNA, 80 bp, synthetic construct; identical to SEQ ID NO: 30489
  source 1..80: mol_type = other DNA

SEQ ID NO: 64905 - DNA, 80 bp, synthetic construct; identical to SEQ ID NO: 11519
  source 1..80: mol_type = other DNA

SEQ ID NO: 64906 - DNA, 80 bp, synthetic construct; identical to SEQ ID NO: 30491
  source 1..80: mol_type = other DNA

SEQ ID NO: 64907 - DNA, 80 bp, synthetic construct; identical to SEQ ID NO: 30492
  source 1..80: mol_type = other DNA

SEQ ID NO: 64908 - DNA, 80 bp, synthetic construct; identical to SEQ ID NO: 11520
  source 1..80: mol_type = other DNA

SEQ ID NO: 64909 - DNA, 80 bp, synthetic construct; identical to SEQ ID NO: 30494
  source 1..80: mol_type = other DNA

SEQ ID NO: 64910 - DNA, 80 bp, synthetic construct; identical to SEQ ID NO: 30495
  source 1..80: mol_type = other DNA

SEQ ID NO: 64911 - DNA, 80 bp, synthetic construct; identical to SEQ ID NO: 30496
  source 1..80: mol_type = other DNA

SEQ ID NO: 64912 - DNA, 80 bp, synthetic construct; identical to SEQ ID NO: 11521
  source 1..80: mol_type = other DNA

SEQ ID NO: 64913 - DNA, 80 bp, synthetic construct; identical to SEQ ID NO: 30498
  source 1..80: mol_type = other DNA

SEQ ID NO: 64914 - DNA, 80 bp, synthetic construct; identical to SEQ ID NO: 30499
  source 1..80: mol_type = other DNA

SEQ ID NO: 64915 - DNA, 80 bp, synthetic construct; identical to SEQ ID NO: 30500
  source 1..80: mol_type = other DNA

SEQ ID NO: 64916 - DNA, 80 bp, synthetic construct; identical to SEQ ID NO: 30501
  source 1..80: mol_type = other DNA

SEQ ID NO: 64917 - DNA, 80 bp, synthetic construct; identical to SEQ ID NO: 11522
  source 1..80: mol_type = other DNA

SEQ ID NO: 64918 - DNA, 80 bp, synthetic construct; identical to SEQ ID NO: 30503
  source 1..80: mol_type = other DNA

SEQ ID NO: 64919 - DNA, 80 bp, synthetic construct; identical to SEQ ID NO: 30504
  source 1..80: mol_type = other DNA

SEQ ID NO: 64920 - DNA, 80 bp, synthetic construct; identical to SEQ ID NO: 11523
  source 1..80: mol_type = other DNA

SEQ ID NO: 64921 - DNA, 80 bp, synthetic construct; identical to SEQ ID NO: 30506
  source 1..80: mol_type = other DNA

SEQ ID NO: 64922 - DNA, 80 bp, synthetic construct; identical to SEQ ID NO: 30507
  source 1..80: mol_type = other DNA

SEQ ID NO: 64923 - DNA, 80 bp, synthetic construct; identical to SEQ ID NO: 30508
  source 1..80: mol_type = other DNA

SEQ ID NO: 64924 - DNA, 80 bp, synthetic construct; identical to SEQ ID NO: 11524
  source 1..80: mol_type = other DNA

SEQ ID NO: 64925 - DNA, 80 bp, synthetic construct; identical to SEQ ID NO: 30510
  source 1..80: mol_type = other DNA

SEQ ID NO: 64926 - DNA, 80 bp, synthetic construct; identical to SEQ ID NO: 30511
  source 1..80: mol_type = other DNA

SEQ ID NO: 64927 - DNA, 80 bp, synthetic construct; identical to SEQ ID NO: 30512
  source 1..80: mol_type = other DNA

SEQ ID NO: 64928 - DNA, 80 bp, synthetic construct; identical to SEQ ID NO: 30513
  source 1..80: mol_type = other DNA

SEQ ID NO: 64929 - DNA, 80 bp, synthetic construct; identical to SEQ ID NO: 11525
  source 1..80: mol_type = other DNA

SEQ ID NO: 64930 - DNA, 80 bp, synthetic construct; identical to SEQ ID NO: 30515
  source 1..80: mol_type = other DNA

SEQ ID NO: 64931 - DNA, 80 bp, synthetic construct; identical to SEQ ID NO: 30516
  source 1..80: mol_type = other DNA

SEQ ID NO: 64932 - DNA, 80 bp, synthetic construct; identical to SEQ ID NO: 11526
  source 1..80: mol_type = other DNA

SEQ ID NO: 64933 - DNA, 80 bp, synthetic construct; identical to SEQ ID NO: 30518
  source 1..80: mol_type = other DNA

SEQ ID NO: 64934 - DNA, 80 bp, synthetic construct; identical to SEQ ID NO: 30519
  source 1..80: mol_type = other DNA

SEQ ID NO: 64935 - DNA, 80 bp, synthetic construct; identical to SEQ ID NO: 30520
  source 1..80: mol_type = other DNA

SEQ ID NO: 64936 - DNA, 80 bp, synthetic construct; identical to SEQ ID NO: 11527
  source 1..80: mol_type = other DNA

SEQ ID NO: 64937 - DNA, 80 bp, synthetic construct; identical to SEQ ID NO: 30522
  source 1..80: mol_type = other DNA

SEQ ID NO: 64938 - DNA, 80 bp, synthetic construct; identical to SEQ ID NO: 30523
  source 1..80: mol_type = other DNA

SEQ ID NO: 64939 - DNA, 80 bp, synthetic construct; identical to SEQ ID NO: 30524
  source 1..80: mol_type = other DNA

SEQ ID NO: 64940 - DNA, 80 bp, synthetic construct; identical to SEQ ID NO: 11528
  source 1..80: mol_type = other DNA

SEQ ID NO: 64941 - DNA, 80 bp, synthetic construct; identical to SEQ ID NO: 11529
  source 1..80: mol_type = other DNA

SEQ ID NO: 64942 - DNA, 80 bp, synthetic construct; identical to SEQ ID NO: 30527
  source 1..80: mol_type = other DNA

SEQ ID NO: 64943 - DNA, 80 bp, synthetic construct; identical to SEQ ID NO: 30528
  source 1..80: mol_type = other DNA

SEQ ID NO: 64944 - DNA, 80 bp, synthetic construct; identical to SEQ ID NO: 30529
  source 1..80: mol_type = other DNA

SEQ ID NO: 64945 - DNA, 80 bp, synthetic construct; identical to SEQ ID NO: 11530
  source 1..80: mol_type = other DNA

SEQ ID NO: 64946 - DNA, 80 bp, synthetic construct; identical to SEQ ID NO: 30531
  source 1..80: mol_type = other DNA

SEQ ID NO: 64947 - DNA, 80 bp, synthetic construct; identical to SEQ ID NO: 30532
  source 1..80: mol_type = other DNA

SEQ ID NO: 64948 - DNA, 80 bp, synthetic construct; identical to SEQ ID NO: 30533
  source 1..80: mol_type = other DNA

SEQ ID NO: 64949 - DNA, 80 bp, synthetic construct; identical to SEQ ID NO: 30534
  source 1..80: mol_type = other DNA

SEQ ID NO: 64950 - DNA, 80 bp, synthetic construct; identical to SEQ ID NO: 11531
  source 1..80: mol_type = other DNA

SEQ ID NO: 64951 - DNA, 80 bp, synthetic construct; identical to SEQ ID NO: 30536
  source 1..80: mol_type = other DNA

SEQ ID NO: 64952 - DNA, 80 bp, synthetic construct; identical to SEQ ID NO: 30537
  source 1..80: mol_type = other DNA

SEQ ID NO: 64953 - DNA, 80 bp, synthetic construct; identical to SEQ ID NO: 11532
  source 1..80: mol_type = other DNA

SEQ ID NO: 64954 - DNA, 80 bp, synthetic construct; identical to SEQ ID NO: 30539
  source 1..80: mol_type = other DNA

SEQ ID NO: 64955 - DNA, 80 bp, synthetic construct; identical to SEQ ID NO: 30540
  source 1..80: mol_type = other DNA

SEQ ID NO: 64956 - DNA, 80 bp, synthetic construct; identical to SEQ ID NO: 30541
  source 1..80: mol_type = other DNA

SEQ ID NO: 64957 - DNA, 80 bp, synthetic construct; identical to SEQ ID NO: 11533
  source 1..80: mol_type = other DNA

SEQ ID NO: 64958 - DNA, 80 bp, synthetic construct; identical to SEQ ID NO: 30544
  source 1..80: mol_type = other DNA

SEQ ID NO: 64959 - DNA, 80 bp, synthetic construct; identical to SEQ ID NO: 30545
  source 1..80: mol_type = other DNA

SEQ ID NO: 64960 - DNA, 80 bp, synthetic construct; identical to SEQ ID NO: 30546
  source 1..80: mol_type = other DNA

SEQ ID NO: 64961 - DNA, 80 bp, synthetic construct; identical to SEQ ID NO: 11534
  source 1..80: mol_type = other DNA

SEQ ID NO: 64962 - DNA, 80 bp, synthetic construct; identical to SEQ ID NO: 30548
  source 1..80: mol_type = other DNA

SEQ ID NO: 64963 - DNA, 80 bp, synthetic construct; identical to SEQ ID NO: 30549
  source 1..80: mol_type = other DNA

SEQ ID NO: 64964 - DNA, 80 bp, synthetic construct; identical to SEQ ID NO: 30550
  source 1..80: mol_type = other DNA

SEQ ID NO: 64965 - DNA, 80 bp, synthetic construct; identical to SEQ ID NO: 11535
  source 1..80: mol_type = other DNA

SEQ ID NO: 64966 - DNA, 80 bp, synthetic construct; identical to SEQ ID NO: 30552
  source 1..80: mol_type = other DNA

SEQ ID NO: 64967 - DNA, 80 bp, synthetic construct; identical to SEQ ID NO: 30554
  source 1..80: mol_type = other DNA

SEQ ID NO: 64968 - DNA, 80 bp, synthetic construct; identical to SEQ ID NO: 30555
  source 1..80: mol_type = other DNA

SEQ ID NO: 64969 - DNA, 80 bp, synthetic construct; identical to SEQ ID NO: 30556
  source 1..80: mol_type = other DNA

SEQ ID NO: 64970 - DNA, 80 bp, synthetic construct; identical to SEQ ID NO: 30557
  source 1..80: mol_type = other DNA

SEQ ID NO: 64971 - DNA, 80 bp, synthetic construct; identical to SEQ ID NO: 11536
  source 1..80: mol_type = other DNA

SEQ ID NO: 64972 - DNA, 80 bp, synthetic construct; identical to SEQ ID NO: 30559
  source 1..80: mol_type = other DNA

SEQ ID NO: 64973 - DNA, 80 bp, synthetic construct; identical to SEQ ID NO: 30560
  source 1..80: mol_type = other DNA

SEQ ID NO: 64974 - DNA, 80 bp, synthetic construct; identical to SEQ ID NO: 30561
  source 1..80: mol_type = other DNA

SEQ ID NO: 64975 - DNA, 80 bp, synthetic construct; identical to SEQ ID NO: 30562
  source 1..80: mol_type = other DNA

SEQ ID NO: 64976 - DNA, 80 bp, synthetic construct; identical to SEQ ID NO: 30563
  source 1..80: mol_type = other DNA

SEQ ID NO: 64977 - DNA, 80 bp, synthetic construct; identical to SEQ ID NO: 30564
  source 1..80: mol_type = other DNA

SEQ ID NO: 64978 - DNA, 80 bp, synthetic construct; identical to SEQ ID NO: 30565
  source 1..80: mol_type = other DNA

SEQ ID NO: 64979 - DNA, 80 bp, synthetic construct; identical to SEQ ID NO: 30566
  source 1..80: mol_type = other DNA

SEQ ID NO: 64980 - DNA, 80 bp, synthetic construct; identical to SEQ ID NO: 30567
  source 1..80: mol_type = other DNA

SEQ ID NO: 64981 - DNA, 80 bp, synthetic construct; identical to SEQ ID NO: 11538
  source 1..80: mol_type = other DNA

SEQ ID NO: 64982 - DNA, 80 bp, synthetic construct; identical to SEQ ID NO: 30569
  source 1..80: mol_type = other DNA

SEQ ID NO: 64983 - DNA, 80 bp, synthetic construct; identical to SEQ ID NO: 11539
  source 1..80: mol_type = other DNA

SEQ ID NO: 64984 - DNA, 80 bp, synthetic construct; identical to SEQ ID NO: 30572
  source 1..80: mol_type = other DNA

SEQ ID NO: 64985 - DNA, 80 bp, synthetic construct; identical to SEQ ID NO: 30573
  source 1..80: mol_type = other DNA

SEQ ID NO: 64986 - DNA, 80 bp, synthetic construct; identical to SEQ ID NO: 30574
  source 1..80: mol_type = other DNA

SEQ ID NO: 64987 - DNA, 80 bp, synthetic construct; identical to SEQ ID NO: 11540
  source 1..80: mol_type = other DNA

SEQ ID NO: 64988 - DNA, 80 bp, synthetic construct; identical to SEQ ID NO: 30576
  source 1..80: mol_type = other DNA

SEQ ID NO: 64989 - DNA, 80 bp, synthetic construct; identical to SEQ ID NO: 30577
  source 1..80: mol_type = other DNA

SEQ ID NO: 64990 - DNA, 80 bp, synthetic construct; identical to SEQ ID NO: 30578
  source 1..80: mol_type = other DNA

SEQ ID NO: 64991 - DNA, 80 bp, synthetic construct; identical to SEQ ID NO: 11541
  source 1..80: mol_type = other DNA

SEQ ID NO: 64992 - DNA, 80 bp, synthetic construct; identical to SEQ ID NO: 30580
  source 1..80: mol_type = other DNA

SEQ ID NO: 64993 - DNA, 80 bp, synthetic construct; identical to SEQ ID NO: 30581
  source 1..80: mol_type = other DNA

SEQ ID NO: 64994 - DNA, 80 bp, synthetic construct; identical to SEQ ID NO: 30582
  source 1..80: mol_type = other DNA

SEQ ID NO: 64995 - DNA, 80 bp, synthetic construct; identical to SEQ ID NO: 30583
  source 1..80: mol_type = other DNA

SEQ ID NO: 64996 - DNA, 80 bp, synthetic construct; identical to SEQ ID NO: 11542
  source 1..80: mol_type = other DNA

SEQ ID NO: 64997 - DNA, 80 bp, synthetic construct; identical to SEQ ID NO: 30585
  source 1..80: mol_type = other DNA

SEQ ID NO: 64998 - DNA, 80 bp, synthetic construct; identical to SEQ ID NO: 30586
  source 1..80: mol_type = other DNA

SEQ ID NO: 64999 - DNA, 80 bp, synthetic construct; identical to SEQ ID NO: 11543
  source 1..80: mol_type = other DNA

SEQ ID NO: 65000 - DNA, 80 bp, synthetic construct; identical to SEQ ID NO: 30588
  source 1..80: mol_type = other DNA

SEQ ID NO: 65001 - DNA, 80 bp, synthetic construct; identical to SEQ ID NO: 11544
  source 1..80: mol_type = other DNA

SEQ ID NO: 65002 - DNA, 80 bp, synthetic construct; identical to SEQ ID NO: 30590
  source 1..80: mol_type = other DNA

SEQ ID NO: 65003 - DNA, 80 bp, synthetic construct; identical to SEQ ID NO: 30591
  source 1..80: mol_type = other DNA

SEQ ID NO: 65004 - DNA, 80 bp, synthetic construct; identical to SEQ ID NO: 30592
  source 1..80: mol_type = other DNA

SEQ ID NO: 65005 - DNA, 80 bp, synthetic construct; identical to SEQ ID NO: 11545
  source 1..80: mol_type = other DNA

SEQ ID NO: 65006 - DNA, 80 bp, synthetic construct; identical to SEQ ID NO: 30594
  source 1..80: mol_type = other DNA

SEQ ID NO: 65007 - DNA, 80 bp, synthetic construct; identical to SEQ ID NO: 30595
  source 1..80: mol_type = other DNA

SEQ ID NO: 65008 - DNA, 80 bp, synthetic construct; identical to SEQ ID NO: 30596
  source 1..80: mol_type = other DNA

SEQ ID NO: 65009 - DNA, 80 bp, synthetic construct; identical to SEQ ID NO: 11546
  source 1..80: mol_type = other DNA

SEQ ID NO: 65010 - DNA, 80 bp, synthetic construct; identical to SEQ ID NO: 30598
  source 1..80: mol_type = other DNA

SEQ ID NO: 65011 - DNA, 80 bp, synthetic construct; identical to SEQ ID NO: 30599
  source 1..80: mol_type = other DNA

SEQ ID NO: 65012 - DNA, 80 bp, synthetic construct; identical to SEQ ID NO: 30600
  source 1..80: mol_type = other DNA

SEQ ID NO: 65013 - DNA, 80 bp, synthetic construct; identical to SEQ ID NO: 30601
  source 1..80: mol_type = other DNA

SEQ ID NO: 65014 - DNA, 80 bp, synthetic construct; identical to SEQ ID NO: 11547
  source 1..80: mol_type = other DNA

SEQ ID NO: 65015 - DNA, 80 bp, synthetic construct; identical to SEQ ID NO: 30603
  source 1..80: mol_type = other DNA

SEQ ID NO: 65016 - DNA, 80 bp, synthetic construct; identical to SEQ ID NO: 30604
  source 1..80: mol_type = other DNA

SEQ ID NO: 65017 - DNA, 80 bp, synthetic construct; identical to SEQ ID NO: 11548
  source 1..80: mol_type = other DNA

SEQ ID NO: 65018 - DNA, 80 bp, synthetic construct; identical to SEQ ID NO: 30606
  source 1..80: mol_type = other DNA

SEQ ID NO: 65019 - DNA, 80 bp, synthetic construct; identical to SEQ ID NO: 11537
  source 1..80: mol_type = other DNA

SEQ ID NO: 65020 - DNA, 80 bp, synthetic construct; identical to SEQ ID NO: 30608
  source 1..80: mol_type = other DNA

SEQ ID NO: 65021 - DNA, 80 bp, synthetic construct; identical to SEQ ID NO: 11549
  source 1..80: mol_type = other DNA

SEQ ID NO: 65022 - DNA, 80 bp, synthetic construct; identical to SEQ ID NO: 30610
  source 1..80: mol_type = other DNA

SEQ ID NO: 65023 - DNA, 80 bp, synthetic construct; identical to SEQ ID NO: 30611
  source 1..80: mol_type = other DNA

SEQ ID NO: 65024 - DNA, 80 bp, synthetic construct; identical to SEQ ID NO: 30612
  source 1..80: mol_type = other DNA

SEQ ID NO: 65025 - DNA, 80 bp, synthetic construct; identical to SEQ ID NO: 30613
  source 1..80: mol_type = other DNA

SEQ ID NO: 65026 - DNA, 80 bp, synthetic construct; identical to SEQ ID NO: 11550
  source 1..80: mol_type = other DNA

SEQ ID NO: 65027 - DNA, 80 bp, synthetic construct; identical to SEQ ID NO: 30615
  source 1..80: mol_type = other DNA

SEQ ID NO: 65028 - DNA, 80 bp, synthetic construct; identical to SEQ ID NO: 30616
  source 1..80: mol_type = other DNA

SEQ ID NO: 65029 - DNA, 80 bp, synthetic construct; identical to SEQ ID NO: 30617
  source 1..80: mol_type = other DNA

SEQ ID NO: 65030 - DNA, 80 bp, synthetic construct; identical to SEQ ID NO: 30618
  source 1..80: mol_type = other DNA

SEQ ID NO: 65031 - DNA, 80 bp, synthetic construct; identical to SEQ ID NO: 11551
  source 1..80: mol_type = other DNA

SEQ ID NO: 65032 - DNA, 80 bp, synthetic construct; identical to SEQ ID NO: 30620
  source 1..80: mol_type = other DNA

SEQ ID NO: 65033 - DNA, 80 bp, synthetic construct; identical to SEQ ID NO: 30622
  source 1..80: mol_type = other DNA

SEQ ID NO: 65034 - DNA, 80 bp, synthetic construct; identical to SEQ ID NO: 11552
  source 1..80: mol_type = other DNA

SEQ ID NO: 65035 - DNA, 80 bp, synthetic construct; identical to SEQ ID NO: 30625
  source 1..80: mol_type = other DNA

SEQ ID NO: 65036 - DNA, 80 bp, synthetic construct; identical to SEQ ID NO: 30626
  source 1..80: mol_type = other DNA

SEQ ID NO: 65037 - DNA, 80 bp, synthetic construct; identical to SEQ ID NO: 11553
  source 1..80: mol_type = other DNA

SEQ ID NO: 65038 - DNA, 80 bp, synthetic construct; identical to SEQ ID NO: 30628
  source 1..80: mol_type = other DNA

SEQ ID NO: 65039 - DNA, 80 bp, synthetic construct; identical to SEQ ID NO: 30629
  source 1..80: mol_type = other DNA

SEQ ID NO: 65040 - DNA, 80 bp, synthetic construct; identical to SEQ ID NO: 30630
  source 1..80: mol_type = other DNA

SEQ ID NO: 65041 - DNA, 80 bp, synthetic construct; identical to SEQ ID NO: 11554
  source 1..80: mol_type = other DNA

SEQ ID NO: 65042 - DNA, 80 bp, synthetic construct; identical to SEQ ID NO: 30632
  source 1..80: mol_type = other DNA

SEQ ID NO: 65043 - DNA, 80 bp, synthetic construct; identical to SEQ ID NO: 30633
  source 1..80: mol_type = other DNA

SEQ ID NO: 65044 - DNA, 80 bp, synthetic construct; identical to SEQ ID NO: 30634
  source 1..80: mol_type = other DNA

SEQ ID NO: 65045 - DNA, 80 bp, synthetic construct; identical to SEQ ID NO: 11555
  source 1..80: mol_type = other DNA

SEQ ID NO: 65046 - DNA, 80 bp, synthetic construct; identical to SEQ ID NO: 30636
  source 1..80: mol_type = other DNA

SEQ ID NO: 65047 - DNA, 80 bp, synthetic construct; identical to SEQ ID NO: 30637
  source 1..80: mol_type = other DNA

SEQ ID NO: 65048 - DNA, 80 bp, synthetic construct; identical to SEQ ID NO: 30638
  source 1..80: mol_type = other DNA

SEQ ID NO: 65049 - DNA, 80 bp, synthetic construct; identical to SEQ ID NO: 30639
  source 1..80: mol_type = other DNA

SEQ ID NO: 65050 - DNA, 80 bp, synthetic construct; identical to SEQ ID NO: 30640
  source 1..80: mol_type = other DNA

SEQ ID NO: 65051 - DNA, 80 bp, synthetic construct; identical to SEQ ID NO: 11556
  source 1..80: mol_type = other DNA

SEQ ID NO: 65052 - DNA, 80 bp, synthetic construct; identical to SEQ ID NO: 30642
  source 1..80: mol_type = other DNA

SEQ ID NO: 65053 - DNA, 80 bp, synthetic construct; identical to SEQ ID NO: 30643
  source 1..80: mol_type = other DNA

SEQ ID NO: 65054 - DNA, 80 bp, synthetic construct; identical to SEQ ID NO: 11557
  source 1..80: mol_type = other DNA

SEQ ID NO: 65055 - DNA, 80 bp, synthetic construct; identical to SEQ ID NO: 30645
  source 1..80: mol_type = other DNA

SEQ ID NO: 65056 - DNA, 80 bp, synthetic construct; identical to SEQ ID NO: 30646
  source 1..80: mol_type = other DNA

SEQ ID NO: 65057 - DNA, 80 bp, synthetic construct; identical to SEQ ID NO: 30647
  source 1..80: mol_type = other DNA

SEQ ID NO: 65058 - DNA, 80 bp, synthetic construct; identical to SEQ ID NO: 11558
  source 1..80: mol_type = other DNA

SEQ ID NO: 65059 - DNA, 80 bp, synthetic construct; identical to SEQ ID NO: 30649
  source 1..80: mol_type = other DNA

SEQ ID NO: 65060 - DNA, 80 bp, synthetic construct; identical to SEQ ID NO: 30650
  source 1..80: mol_type = other DNA

SEQ ID NO: 65061 - DNA, 80 bp, synthetic construct; identical to SEQ ID NO: 11559
  source 1..80: mol_type = other DNA

SEQ ID NO: 65062 - DNA, 80 bp, synthetic construct; identical to SEQ ID NO: 30654
  source 1..80: mol_type = other DNA

SEQ ID NO: 65063 - DNA, 80 bp, synthetic construct; identical to SEQ ID NO: 11560
  source 1..80: mol_type = other DNA

SEQ ID NO: 65064 - DNA, 80 bp, synthetic construct; identical to SEQ ID NO: 30656
  source 1..80: mol_type = other DNA

SEQ ID NO: 65065 - DNA, 80 bp, synthetic construct; identical to SEQ ID NO: 30657
  source 1..80: mol_type = other DNA

SEQ ID NO: 65066 - DNA, 80 bp, synthetic construct; identical to SEQ ID NO: 30658
  source 1..80: mol_type = other DNA

SEQ ID NO: 65067 - DNA, 80 bp, synthetic construct; identical to SEQ ID NO: 11561
  source 1..80: mol_type = other DNA

SEQ ID NO: 65068 - DNA, 80 bp, synthetic construct; identical to SEQ ID NO: 30661
  source 1..80: mol_type = other DNA

SEQ ID NO: 65069 - DNA, 80 bp, synthetic construct; identical to SEQ ID NO: 30662
  source 1..80: mol_type = other DNA

SEQ ID NO: 65070 - DNA, 80 bp, synthetic construct; identical to SEQ ID NO: 30663
  source 1..80: mol_type = other DNA

SEQ ID NO: 65071 - DNA, 80 bp, synthetic construct; identical to SEQ ID NO: 11562
  source 1..80: mol_type = other DNA

SEQ ID NO: 65072 - DNA, 80 bp, synthetic construct; identical to SEQ ID NO: 30665
  source 1..80: mol_type = other DNA

SEQ ID NO: 65073 - DNA, 80 bp, synthetic construct; identical to SEQ ID NO: 30666
  source 1..80: mol_type = other DNA

SEQ ID NO: 65074 - DNA, 80 bp, synthetic construct; identical to SEQ ID NO: 11563
  source 1..80: mol_type = other DNA

SEQ ID NO: 65075 - DNA, 80 bp, synthetic construct; identical to SEQ ID NO: 30669
  source 1..80: mol_type = other DNA

SEQ ID NO: 65076 - DNA, 80 bp, synthetic construct; identical to SEQ ID NO: 30670
  source 1..80: mol_type = other DNA

SEQ ID NO: 65077 - DNA, 80 bp, synthetic construct; identical to SEQ ID NO: 30671
  source 1..80: mol_type = other DNA

SEQ ID NO: 65078 - DNA, 80 bp, synthetic construct; identical to SEQ ID NO: 11564
  source 1..80: mol_type = other DNA

SEQ ID NO: 65079 - DNA, 80 bp, synthetic construct; identical to SEQ ID NO: 30673
  source 1..80: mol_type = other DNA

SEQ ID NO: 65080 - DNA, 80 bp, synthetic construct; identical to SEQ ID NO: 30674
  source 1..80: mol_type = other DNA

SEQ ID NO: 65081 - DNA, 80 bp, synthetic construct; identical to SEQ ID NO: 30675
  source 1..80: mol_type = other DNA

SEQ ID NO: 65082 - DNA, 80 bp, synthetic construct; identical to SEQ ID NO: 11565
  source 1..80: mol_type = other DNA

SEQ ID NO: 65083 - DNA, 80 bp, synthetic construct; identical to SEQ ID NO: 30677
  source 1..80: mol_type = other DNA

SEQ ID NO: 65084 - DNA, 80 bp, synthetic construct; identical to SEQ ID NO: 30678
  source 1..80: mol_type = other DNA

SEQ ID NO: 65085 - DNA, 80 bp, synthetic construct; identical to SEQ ID NO: 11566
  source 1..80: mol_type = other DNA

SEQ ID NO: 65086 - DNA, 80 bp, synthetic construct; identical to SEQ ID NO: 30681
  source 1..80: mol_type = other DNA

SEQ ID NO: 65087 - DNA, 80 bp, synthetic construct; identical to SEQ ID NO: 30682
  source 1..80: mol_type = other DNA

SEQ ID NO: 65088 - DNA, 80 bp, synthetic construct; identical to SEQ ID NO: 30683
  source 1..80: mol_type = other DNA

SEQ ID NO: 65089 - DNA, 80 bp, synthetic construct; identical to SEQ ID NO: 11567
  source 1..80: mol_type = other DNA

SEQ ID NO: 65090 - DNA, 80 bp, synthetic construct; identical to SEQ ID NO: 30685
  source 1..80: mol_type = other DNA

SEQ ID NO: 65091 - DNA, 80 bp, synthetic construct; identical to SEQ ID NO: 30686
  source 1..80: mol_type = other DNA

SEQ ID NO: 65092 - DNA, 80 bp, synthetic construct; identical to SEQ ID NO: 30687
  source 1..80: mol_type = other DNA

SEQ ID NO: 65093 - DNA, 80 bp, synthetic construct; identical to SEQ ID NO: 11568
  source 1..80: mol_type = other DNA

SEQ ID NO: 65094 - DNA, 80 bp, synthetic construct; identical to SEQ ID NO: 30690
  source 1..80: mol_type = other DNA

SEQ ID NO: 65095 - DNA, 80 bp, synthetic construct; identical to SEQ ID NO: 11569
  source 1..80: mol_type = other DNA

SEQ ID NO: 65096 - DNA, 80 bp, synthetic construct; identical to SEQ ID NO: 30692
  source 1..80: mol_type = other DNA

SEQ ID NO: 65097 - DNA, 80 bp, synthetic construct; identical to SEQ ID NO: 30693
  source 1..80: mol_type = other DNA

SEQ ID NO: 65098 - DNA, 80 bp, synthetic construct; identical to SEQ ID NO: 30694
  source 1..80: mol_type = other DNA

SEQ ID NO: 65099 - DNA, 80 bp, synthetic construct; identical to SEQ ID NO: 11570
  source 1..80: mol_type = other DNA

SEQ ID NO: 65100 - DNA, 80 bp, synthetic construct; identical to SEQ ID NO: 30696
  source 1..80: mol_type = other DNA

SEQ ID NO: 65101 - DNA, 80 bp, synthetic construct; identical to SEQ ID NO: 30697
  source 1..80: mol_type = other DNA

SEQ ID NO: 65102 - DNA, 80 bp, synthetic construct; identical to SEQ ID NO: 30698
  source 1..80: mol_type = other DNA

SEQ ID NO: 65103 - DNA, 80 bp, synthetic construct; identical to SEQ ID NO: 11571
  source 1..80: mol_type = other DNA

SEQ ID NO: 65104 - DNA, 80 bp, synthetic construct; identical to SEQ ID NO: 30700
  source 1..80: mol_type = other DNA

SEQ ID NO: 65105 - DNA, 80 bp, synthetic construct; identical to SEQ ID NO: 11572
  source 1..80: mol_type = other DNA

SEQ ID NO: 65106 - DNA, 80 bp, synthetic construct; identical to SEQ ID NO: 30703
  source 1..80: mol_type = other DNA

SEQ ID NO: 65107 - DNA, 80 bp, synthetic construct; identical to SEQ ID NO: 30704
  source 1..80: mol_type = other DNA

SEQ ID NO: 65108 - DNA, 80 bp, synthetic construct; identical to SEQ ID NO: 30705
  source 1..80: mol_type = other DNA

SEQ ID NO: 65109 - DNA, 80 bp, synthetic construct; identical to SEQ ID NO: 11573
  source 1..80: mol_type = other DNA

SEQ ID NO: 65110 - DNA, 80 bp, synthetic construct; identical to SEQ ID NO: 30708
  source 1..80: mol_type = other DNA

SEQ ID NO: 65111 - DNA, 80 bp, synthetic construct; identical to SEQ ID NO: 30709
  source 1..80: mol_type = other DNA

SEQ ID NO: 65112 - DNA, 80 bp, synthetic construct; identical to SEQ ID NO: 11574
  source 1..80: mol_type = other DNA

SEQ ID NO: 65113 - DNA, 80 bp, synthetic construct; identical to SEQ ID NO: 30711
  source 1..80: mol_type = other DNA

SEQ ID NO: 65114 - DNA, 80 bp, synthetic construct; identical to SEQ ID NO: 30712
  source 1..80: mol_type = other DNA

SEQ ID NO: 65115 - DNA, 80 bp, synthetic construct; identical to SEQ ID NO: 30713
  source 1..80: mol_type = other DNA

SEQ ID NO: 65116 - DNA, 80 bp, synthetic construct; identical to SEQ ID NO: 30714
  source 1..80: mol_type = other DNA

SEQ ID NO: 65117 - DNA, 80 bp, synthetic construct; identical to SEQ ID NO: 11575
  source 1..80: mol_type = other DNA

SEQ ID NO: 65118 - DNA, 80 bp, synthetic construct; identical to SEQ ID NO: 30716
  source 1..80: mol_type = other DNA

SEQ ID NO: 65119 - DNA, 80 bp, synthetic construct; identical to SEQ ID NO: 30717
  source 1..80: mol_type = other DNA

SEQ ID NO: 65120 - DNA, 80 bp, synthetic construct; identical to SEQ ID NO: 11576
  source 1..80: mol_type = other DNA

SEQ ID NO: 65121 - DNA, 80 bp, synthetic construct; identical to SEQ ID NO: 30719
  source 1..80: mol_type = other DNA

SEQ ID NO: 65122 - DNA, 80 bp, synthetic construct; identical to SEQ ID NO: 30720
  source 1..80: mol_type = other DNA

SEQ ID NO: 65123 - DNA, 80 bp, synthetic construct; identical to SEQ ID NO: 30721
  source 1..80: mol_type = other DNA

SEQ ID NO: 65124 - DNA, 80 bp, synthetic construct; identical to SEQ ID NO: 30722
  source 1..80: mol_type = other DNA

SEQ ID NO: 65125 - DNA, 80 bp, synthetic construct; identical to SEQ ID NO: 11577
  source 1..80: mol_type = other DNA

SEQ ID NO: 65126 - DNA, 80 bp, synthetic construct; identical to SEQ ID NO: 30724
  source 1..80: mol_type = other DNA

SEQ ID NO: 65127 - DNA, 80 bp, synthetic construct; identical to SEQ ID NO: 30725
  source 1..80: mol_type = other DNA

SEQ ID NO: 65128 - DNA, 80 bp, synthetic construct; identical to SEQ ID NO: 11578
  source 1..80: mol_type = other DNA

SEQ ID NO: 65129 - DNA, 80 bp, synthetic construct; identical to SEQ ID NO: 30727
  source 1..80: mol_type = other DNA

SEQ ID NO: 65130 - DNA, 80 bp, synthetic construct; identical to SEQ ID NO: 30728
  source 1..80: mol_type = other DNA

SEQ ID NO: 65131 - DNA, 80 bp, synthetic construct; identical to SEQ ID NO: 11579
  source 1..80: mol_type = other DNA

SEQ ID NO: 65132 - DNA, 80 bp, synthetic construct; identical to SEQ ID NO: 30731
  source 1..80: mol_type = other DNA

SEQ ID NO: 65133 - DNA, 80 bp, synthetic construct; identical to SEQ ID NO: 30732
  source 1..80: mol_type = other DNA

SEQ ID NO: 65134 - DNA, 80 bp, synthetic construct; identical to SEQ ID NO: 30733
  source 1..80: mol_type = other DNA

SEQ ID NO: 65135 - DNA, 80 bp, synthetic construct; identical to SEQ ID NO: 11580
  source 1..80: mol_type = other DNA

SEQ ID NO: 65136 - DNA, 80 bp, synthetic construct; identical to SEQ ID NO: 30735
  source 1..80: mol_type = other DNA

SEQ ID NO: 65137 - DNA, 80 bp, synthetic construct; identical to SEQ ID NO: 30736
  source 1..80: mol_type = other DNA

SEQ ID NO: 65138 - DNA, 80 bp, synthetic construct; identical to SEQ ID NO: 11581
  source 1..80: mol_type = other DNA

SEQ ID NO: 65139 - DNA, 80 bp, synthetic construct; identical to SEQ ID NO: 30738
  source 1..80: mol_type = other DNA

SEQ ID NO: 65140 - DNA, 80 bp, synthetic construct; identical to SEQ ID NO: 30739
  source 1..80: mol_type = other DNA

SEQ ID NO: 65141 - DNA, 80 bp, synthetic construct; identical to SEQ ID NO: 30740
  source 1..80: mol_type = other DNA

SEQ ID NO: 65142 - DNA, 80 bp, synthetic construct; identical to SEQ ID NO: 30741
  source 1..80: mol_type = other DNA

SEQ ID NO: 65143 - DNA, 80 bp, synthetic construct; identical to SEQ ID NO: 11582
  source 1..80: mol_type = other DNA

SEQ ID NO: 65144 - DNA, 80 bp, synthetic construct; identical to SEQ ID NO: 30743
  source 1..80: mol_type = other DNA

SEQ ID NO: 65145 - DNA, 80 bp, synthetic construct; identical to SEQ ID NO: 30744
  source 1..80: mol_type = other DNA

SEQ ID NO: 65146 - DNA, 80 bp, synthetic construct; identical to SEQ ID NO: 30745
  source 1..80: mol_type = other DNA

SEQ ID NO: 65147 - DNA, 80 bp, synthetic construct; identical to SEQ ID NO: 11583
  source 1..80: mol_type = other DNA

SEQ ID NO: 65148 - DNA, 80 bp, synthetic construct; identical to SEQ ID NO: 30747
  source 1..80: mol_type = other DNA

SEQ ID NO: 65149 - DNA, 80 bp, synthetic construct; identical to SEQ ID NO: 30748
  source 1..80: mol_type = other DNA

SEQ ID NO: 65150 - DNA, 80 bp, synthetic construct; identical to SEQ ID NO: 30749
  source 1..80: mol_type = other DNA

SEQ ID NO: 65151 - DNA, 80 bp, synthetic construct; identical to SEQ ID NO: 30750
  source 1..80: mol_type = other DNA

SEQ ID NO: 65152 - DNA, 80 bp, synthetic construct; identical to SEQ ID NO: 11584
  source 1..80: mol_type = other DNA

SEQ ID NO: 65153 - DNA, 80 bp, synthetic construct; identical to SEQ ID NO: 30752
  source 1..80: mol_type = other DNA

SEQ ID NO: 65154 - DNA, 80 bp, synthetic construct; identical to SEQ ID NO: 30753
  source 1..80: mol_type = other DNA

SEQ ID NO: 65155 - DNA, 80 bp, synthetic construct; identical to SEQ ID NO: 11585
  source 1..80: mol_type = other DNA

SEQ ID NO: 65156 - DNA, 80 bp, synthetic construct; identical to SEQ ID NO: 30755
  source 1..80: mol_type = other DNA

SEQ ID NO: 65157 - DNA, 80 bp, synthetic construct; identical to SEQ ID NO: 30756
  source 1..80: mol_type = other DNA

SEQ ID NO: 65158 - DNA, 80 bp, synthetic construct; identical to SEQ ID NO: 30757
  source 1..80: mol_type = other DNA

SEQ ID NO: 65159 - DNA, 80 bp, synthetic construct; identical to SEQ ID NO: 30758
  source 1..80: mol_type = other DNA

SEQ ID NO: 65160 - DNA, 80 bp, synthetic construct; identical to SEQ ID NO: 11586
  source 1..80: mol_type = other DNA

SEQ ID NO: 65161 - DNA, 80 bp, synthetic construct; identical to SEQ ID NO: 30760
  source 1..80: mol_type = other DNA

SEQ ID NO: 65162 - DNA, 80 bp, synthetic construct; identical to SEQ ID NO: 30761
  source 1..80: mol_type = other DNA

SEQ ID NO: 65163 - DNA, 80 bp, synthetic construct; identical to SEQ ID NO: 30762
  source 1..80: mol_type = other DNA

SEQ ID NO: 65164 - DNA, 80 bp, synthetic construct; identical to SEQ ID NO: 11587
  source 1..80: mol_type = other DNA

SEQ ID NO: 65165 - DNA, 80 bp, synthetic construct; identical to SEQ ID NO: 30764
  source 1..80: mol_type = other DNA

SEQ ID NO: 65166 - DNA, 80 bp, synthetic construct; identical to SEQ ID NO: 30766
  source 1..80: mol_type = other DNA

SEQ ID NO: 65167 - DNA, 80 bp, synthetic construct; identical to SEQ ID NO: 11588
  source 1..80: mol_type = other DNA

SEQ ID NO: 65168 - DNA, 80 bp, synthetic construct; identical to SEQ ID NO: 30769
  source 1..80: mol_type = other DNA

SEQ ID NO: 65169 - DNA, 80 bp, synthetic construct; identical to SEQ ID NO: 11589
  source 1..80: mol_type = other DNA

SEQ ID NO: 65170 - DNA, 80 bp, synthetic construct; identical to SEQ ID NO: 30773
  source 1..80: mol_type = other DNA

SEQ ID NO: 65171 - DNA, 80 bp, synthetic construct; identical to SEQ ID NO: 11590
  source 1..80: mol_type = other DNA

SEQ ID NO: 65172 - DNA, 80 bp, synthetic construct; identical to SEQ ID NO: 30776
  source 1..80: mol_type = other DNA

SEQ ID NO: 65173 - DNA, 80 bp, synthetic construct; identical to SEQ ID NO: 30777
  source 1..80: mol_type = other DNA

SEQ ID NO: 65174 - DNA, 80 bp, synthetic construct; identical to SEQ ID NO: 11591
  source 1..80: mol_type = other DNA

SEQ ID NO: 65175 - DNA, 80 bp, synthetic construct; identical to SEQ ID NO: 30779
  source 1..80: mol_type = other DNA

SEQ ID NO: 65176 - DNA, 80 bp, synthetic construct; identical to SEQ ID NO: 30780
  source 1..80: mol_type = other DNA

SEQ ID NO: 65177 - DNA, 80 bp, synthetic construct; identical to SEQ ID NO: 30781
  source 1..80: mol_type = other DNA

SEQ ID NO: 65178 - DNA, 80 bp, synthetic construct; identical to SEQ ID NO: 30782
  source 1..80: mol_type = other DNA

SEQ ID NO: 65179 - DNA, 80 bp, synthetic construct; identical to SEQ ID NO: 11592
  source 1..80: mol_type = other DNA

SEQ ID NO: 65180 - DNA, 80 bp, synthetic construct; identical to SEQ ID NO: 30785
  source 1..80: mol_type = other DNA

SEQ ID NO: 65181 - DNA, 80 bp, synthetic construct; identical to SEQ ID NO: 11593
  source 1..80: mol_type = other DNA

SEQ ID NO: 65182 - DNA, 80 bp, synthetic construct; identical to SEQ ID NO: 30789
  source 1..80: mol_type = other DNA

SEQ ID NO: 65183 - DNA, 80 bp, synthetic construct; identical to SEQ ID NO: 11594
  source 1..80: mol_type = other DNA

SEQ ID NO: 65184 - DNA, 80 bp, synthetic construct; identical to SEQ ID NO: 12253
  source 1..80: mol_type = other DNA

SEQ ID NO: 65185 - DNA, 80 bp, synthetic construct; identical to SEQ ID NO: 30795
  source 1..80: mol_type = other DNA

SEQ ID NO: 65186 - DNA, 80 bp, synthetic construct; identical to SEQ ID NO: 30797
  source 1..80: mol_type = other DNA

SEQ ID NO: 65187 - DNA, 80 bp, synthetic construct; identical to SEQ ID NO: 11596
  source 1..80: mol_type = other DNA

SEQ ID NO: 65188 - DNA, 80 bp, synthetic construct; identical to SEQ ID NO: 30800
  source 1..80: mol_type = other DNA

SEQ ID NO: 65189 - DNA, 80 bp, synthetic construct; identical to SEQ ID NO: 30802
  source 1..80: mol_type = other DNA

SEQ ID NO: 65190 - DNA, 80 bp, synthetic construct; identical to SEQ ID NO: 30803
  source 1..80: mol_type = other DNA

SEQ ID NO: 65191 - DNA, 80 bp, synthetic construct; identical to SEQ ID NO: 30805
  source 1..80: mol_type = other DNA

SEQ ID NO: 65192 - DNA, 80 bp, synthetic construct; identical to SEQ ID NO: 30807
  source 1..80: mol_type = other DNA

SEQ ID NO: 65193 - DNA, 80 bp, synthetic construct; identical to SEQ ID NO: 30809
  source 1..80: mol_type = other DNA

SEQ ID NO: 65194 - DNA, 80 bp, synthetic construct; identical to SEQ ID NO: 11599
  source 1..80: mol_type = other DNA

SEQ ID NO: 65195 - DNA, 80 bp, synthetic construct; identical to SEQ ID NO: 30812
  source 1..80: mol_type = other DNA

SEQ ID NO: 65196 - DNA, 80 bp, synthetic construct; identical to SEQ ID NO: 30813
  source 1..80: mol_type = other DNA

SEQ ID NO: 65197 - DNA, 80 bp, synthetic construct; identical to SEQ ID NO: 11600
  source 1..80: mol_type = other DNA

SEQ ID NO: 65198 - DNA, 80 bp, synthetic construct; identical to SEQ ID NO: 30817
  source 1..80: mol_type = other DNA

SEQ ID NO: 65199 - DNA, 80 bp, synthetic construct; identical to SEQ ID NO: 30818
  source 1..80: mol_type = other DNA

SEQ ID NO: 65200 - DNA, 80 bp, synthetic construct; identical to SEQ ID NO: 30819
  source 1..80: mol_type = other DNA

SEQ ID NO: 65201 - DNA, 80 bp, synthetic construct; identical to SEQ ID NO: 11601
  source 1..80: mol_type = other DNA

SEQ ID NO: 65202 - DNA, 80 bp, synthetic construct; identical to SEQ ID NO: 30821
  source 1..80: mol_type = other DNA

SEQ ID NO: 65203 - DNA, 80 bp, synthetic construct; identical to SEQ ID NO: 30822
  source 1..80: mol_type = other DNA

SEQ ID NO: 65204 - DNA, 80 bp, synthetic construct; identical to SEQ ID NO: 30823
  source 1..80: mol_type = other DNA

SEQ ID NO: 65205 - DNA, 80 bp, synthetic construct; identical to SEQ ID NO: 11602
  source 1..80: mol_type = other DNA

SEQ ID NO: 65206 - DNA, 80 bp, synthetic construct; identical to SEQ ID NO: 30825
  source 1..80: mol_type = other DNA

SEQ ID NO: 65207 - DNA, 80 bp, synthetic construct; identical to SEQ ID NO: 30826
  source 1..80: mol_type = other DNA

SEQ ID NO: 65208 - DNA, 80 bp, synthetic construct; identical to SEQ ID NO: 30827
  source 1..80: mol_type = other DNA

SEQ ID NO: 65209 - DNA, 80 bp, synthetic construct; identical to SEQ ID NO: 11603
  source 1..80: mol_type = other DNA

SEQ ID NO: 65210 - DNA, 80 bp, synthetic construct; identical to SEQ ID NO: 30829
  source 1..80: mol_type = other DNA

SEQ ID NO: 65211 - DNA, 80 bp, synthetic construct; identical to SEQ ID NO: 30830
  source 1..80: mol_type = other DNA

SEQ ID NO: 65212 - DNA, 80 bp, synthetic construct; identical to SEQ ID NO: 11604
  source 1..80: mol_type = other DNA

SEQ ID NO: 65213 - DNA, 80 bp, synthetic construct; identical to SEQ ID NO: 30832
  source 1..80: mol_type = other DNA

SEQ ID NO: 65214 - DNA, 80 bp, synthetic construct; identical to SEQ ID NO: 30833
  source 1..80: mol_type = other DNA

SEQ ID NO: 65215 - DNA, 80 bp, synthetic construct; identical to SEQ ID NO: 30834
  source 1..80: mol_type = other DNA

SEQ ID NO: 65216 - DNA, 80 bp, synthetic construct; identical to SEQ ID NO: 30835
  source 1..80: mol_type = other DNA

SEQ ID NO: 65217 - DNA, 80 bp, synthetic construct; identical to SEQ ID NO: 11605
  source 1..80: mol_type = other DNA

SEQ ID NO: 65218 - DNA, 80 bp, synthetic construct; identical to SEQ ID NO: 30837
  source 1..80: mol_type = other DNA

SEQ ID NO: 65219 - DNA, 80 bp, synthetic construct; identical to SEQ ID NO: 30838
  source 1..80: mol_type = other DNA

SEQ ID NO: 65220 - DNA, 80 bp, synthetic construct; identical to SEQ ID NO: 30839
  source 1..80: mol_type = other DNA

SEQ ID NO: 65221 - DNA, 80 bp, synthetic construct; identical to SEQ ID NO: 11606
  source 1..80: mol_type = other DNA

SEQ ID NO: 65222 - DNA, 80 bp, synthetic construct; identical to SEQ ID NO: 30841
  source 1..80: mol_type = other DNA

SEQ ID NO: 65223 - DNA, 80 bp, synthetic construct; identical to SEQ ID NO: 30842
  source 1..80: mol_type = other DNA

SEQ ID NO: 65224 - DNA, 80 bp, synthetic construct; identical to SEQ ID NO: 30843
  source 1..80: mol_type = other DNA

SEQ ID NO: 65225 - DNA, 80 bp, synthetic construct; identical to SEQ ID NO: 11607
  source 1..80: mol_type = other DNA

SEQ ID NO: 65226 - DNA, 80 bp, synthetic construct; identical to SEQ ID NO: 30845
  source 1..80: mol_type = other DNA

SEQ ID NO: 65227 - DNA, 80 bp, synthetic construct; identical to SEQ ID NO: 30846
  source 1..80: mol_type = other DNA

SEQ ID NO: 65228 - DNA, 80 bp, synthetic construct; identical to SEQ ID NO: 30847
  source 1..80: mol_type = other DNA

SEQ ID NO: 65229 - DNA, 80 bp, synthetic construct; identical to SEQ ID NO: 11608
  source 1..80: mol_type = other DNA

SEQ ID NO: 65230 - DNA, 80 bp, synthetic construct; identical to SEQ ID NO: 30849
  source 1..80: mol_type = other DNA

SEQ ID NO: 65231 - DNA, 80 bp, synthetic construct; identical to SEQ ID NO: 30850
  source 1..80: mol_type = other DNA

SEQ ID NO: 65232 - DNA, 80 bp, synthetic construct; identical to SEQ ID NO: 30851
  source 1..80: mol_type = other DNA

SEQ ID NO: 65233 - DNA, 80 bp, synthetic construct; identical to SEQ ID NO: 11609
  source 1..80: mol_type = other DNA

SEQ ID NO: 65234 - DNA, 80 bp, synthetic construct; identical to SEQ ID NO: 30853
  source 1..80: mol_type = other DNA

SEQ ID NO: 65235 - DNA, 80 bp, synthetic construct; identical to SEQ ID NO: 30854
  source 1..80: mol_type = other DNA

SEQ ID NO: 65236 - DNA, 80 bp, synthetic construct; identical to SEQ ID NO: 30855
  source 1..80: mol_type = other DNA

SEQ ID NO: 65237 - DNA, 80 bp, synthetic construct; identical to SEQ ID NO: 11610
  source 1..80: mol_type = other DNA

SEQ ID NO: 65238 - DNA, 80 bp, synthetic construct; identical to SEQ ID NO: 30857
  source 1..80: mol_type = other DNA

SEQ ID NO: 65239 - DNA, 80 bp, synthetic construct; identical to SEQ ID NO: 30858
  source 1..80: mol_type = other DNA

SEQ ID NO: 65240 - DNA, 80 bp, synthetic construct; identical to SEQ ID NO: 30859
  source 1..80: mol_type = other DNA

SEQ ID NO: 65241 - DNA, 80 bp, synthetic construct; identical to SEQ ID NO: 30860
  source 1..80: mol_type = other DNA

SEQ ID NO: 65242 - DNA, 80 bp, synthetic construct; identical to SEQ ID NO: 11611
  source 1..80: mol_type = other DNA

SEQ ID NO: 65243 - DNA, 80 bp, synthetic construct; identical to SEQ ID NO: 30862
  source 1..80: mol_type = other DNA

SEQ ID NO: 65244 - DNA, 80 bp, synthetic construct; identical to SEQ ID NO: 30863
  source 1..80: mol_type = other DNA

SEQ ID NO: 65245 - DNA, 80 bp, synthetic construct; identical to SEQ ID NO: 30865
  source 1..80: mol_type = other DNA

SEQ ID NO: 65246 - DNA, 80 bp, synthetic construct; identical to SEQ ID NO: 30866
  source 1..80: mol_type = other DNA

SEQ ID NO: 65247 - DNA, 80 bp, synthetic construct; identical to SEQ ID NO: 30868
  source 1..80: mol_type = other DNA

SEQ ID NO: 65248 - DNA, 80 bp, synthetic construct; identical to SEQ ID NO: 11613
  source 1..80: mol_type = other DNA

SEQ ID NO: 65249 - DNA, 80 bp, synthetic construct; identical to SEQ ID NO: 30871
  source 1..80: mol_type = other DNA

SEQ ID NO: 65250 - DNA, 80 bp, synthetic construct; identical to SEQ ID NO: 11614
  source 1..80: mol_type = other DNA

SEQ ID NO: 65251 - DNA, 80 bp, synthetic construct; identical to SEQ ID NO: 30875
  source 1..80: mol_type = other DNA

SEQ ID NO: 65252 - DNA, 80 bp, synthetic construct; identical to SEQ ID NO: 11615
  source 1..80: mol_type = other DNA

SEQ ID NO: 65253 - DNA, 80 bp, synthetic construct; identical to SEQ ID NO: 30879
  source 1..80: mol_type = other DNA

SEQ ID NO: 65254 - DNA, 80 bp, synthetic construct; identical to SEQ ID NO: 11616
  source 1..80: mol_type = other DNA

SEQ ID NO: 65255 - DNA, 80 bp, synthetic construct; identical to SEQ ID NO: 30882
  source 1..80: mol_type = other DNA

SEQ ID NO: 65256 - DNA, 80 bp, synthetic construct; identical to SEQ ID NO: 30883
  source 1..80: mol_type = other DNA

SEQ ID NO: 65257 - DNA, 80 bp, synthetic construct; identical to SEQ ID NO: 30884
  source 1..80: mol_type = other DNA

SEQ ID NO: 65258 - DNA, 80 bp, synthetic construct; identical to SEQ ID NO: 11617
  source 1..80: mol_type = other DNA

SEQ ID NO: 65259 - DNA, 80 bp, synthetic construct; identical to SEQ ID NO: 30886
  source 1..80: mol_type = other DNA

SEQ ID NO: 65260 - DNA, 80 bp, synthetic construct; identical to SEQ ID NO: 30887
  source 1..80: mol_type = other DNA

SEQ ID NO: 65261 - DNA, 80 bp, synthetic construct; identical to SEQ ID NO: 30888
  source 1..80: mol_type = other DNA

SEQ ID NO: 65262 - DNA, 80 bp, synthetic construct; identical to SEQ ID NO: 11618
  source 1..80: mol_type = other DNA

SEQ ID NO: 65263 - DNA, 80 bp, synthetic construct; identical to SEQ ID NO: 30891
  source 1..80: mol_type = other DNA

SEQ ID NO: 65264 - DNA, 80 bp, synthetic construct; identical to SEQ ID NO: 30892
  source 1..80: mol_type = other DNA

SEQ ID NO: 65265 - DNA, 80 bp, synthetic construct; identical to SEQ ID NO: 11619
  source 1..80: mol_type = other DNA

SEQ ID NO: 65266 - DNA, 80 bp, synthetic construct; identical to SEQ ID NO: 30894
  source 1..80: mol_type = other DNA

SEQ ID NO: 65267 - DNA, 80 bp, synthetic construct; identical to SEQ ID NO: 30895
  source 1..80: mol_type = other DNA

SEQ ID NO: 65268 - DNA, 80 bp, synthetic construct; identical to SEQ ID NO: 11620
  source 1..80: mol_type = other DNA

SEQ ID NO: 65269 - DNA, 80 bp, synthetic construct; identical to SEQ ID NO: 30898
  source 1..80: mol_type = other DNA

SEQ ID NO: 65270 - DNA, 80 bp, synthetic construct; identical to SEQ ID NO: 30899
  source 1..80: mol_type = other DNA

SEQ ID NO: 65271 - DNA, 80 bp, synthetic construct; identical to SEQ ID NO: 30900
  source 1..80: mol_type = other DNA

SEQ ID NO: 65272 - DNA, 80 bp, synthetic construct; identical to SEQ ID NO: 11621
  source 1..80: mol_type = other DNA

SEQ ID NO: 65273 - DNA, 80 bp, synthetic construct; identical to SEQ ID NO: 30902
  source 1..80: mol_type = other DNA

SEQ ID NO: 65274 - DNA, 80 bp, synthetic construct; identical to SEQ ID NO: 30903
  source 1..80: mol_type = other DNA

SEQ ID NO: 65275 - DNA, 80 bp, synthetic construct; identical to SEQ ID NO: 11622
  source 1..80: mol_type = other DNA

SEQ ID NO: 65276 - DNA, 80 bp, synthetic construct; identical to SEQ ID NO: 30905
  source 1..80: mol_type = other DNA

SEQ ID NO: 65277 - DNA, 80 bp, synthetic construct; identical to SEQ ID NO: 30906
  source 1..80: mol_type = other DNA

SEQ ID NO: 65278 - DNA, 80 bp, synthetic construct; identical to SEQ ID NO: 30907
  source 1..80: mol_type = other DNA

SEQ ID NO: 65279 - DNA, 80 bp, synthetic construct; identical to SEQ ID NO: 11623
  source 1..80: mol_type = other DNA

SEQ ID NO: 65280 - DNA, 80 bp, synthetic construct; identical to SEQ ID NO: 30909
  source 1..80: mol_type = other DNA

SEQ ID NO: 65281 - DNA, 80 bp, synthetic construct; identical to SEQ ID NO: 30910
  source 1..80: mol_type = other DNA

SEQ ID NO: 65282 - DNA, 80 bp, synthetic construct; identical to SEQ ID NO: 30911
  source 1..80: mol_type = other DNA

SEQ ID NO: 65283 - DNA, 80 bp, synthetic construct; identical to SEQ ID NO: 11624
  source 1..80: mol_type = other DNA

SEQ ID NO: 65284 - DNA, 80 bp, synthetic construct; identical to SEQ ID NO: 30913
  source 1..80: mol_type = other DNA

SEQ ID NO: 65285 - DNA, 80 bp, synthetic construct; identical to SEQ ID NO: 30914
  source 1..80: mol_type = other DNA

SEQ ID NO: 65286 - DNA, 80 bp, synthetic construct; identical to SEQ ID NO: 30915
  source 1..80: mol_type = other DNA

SEQ ID NO: 65287 - DNA, 80 bp, synthetic construct; identical to SEQ ID NO: 11625
  source 1..80: mol_type = other DNA

SEQ ID NO: 65288 - DNA, 80 bp, synthetic construct; identical to SEQ ID NO: 30917
  source 1..80: mol_type = other DNA

SEQ ID NO: 65289 - DNA, 80 bp, synthetic construct; identical to SEQ ID NO: 30918
  source 1..80: mol_type = other DNA

SEQ ID NO: 65290 - DNA, 80 bp, synthetic construct; identical to SEQ ID NO: 30919
  source 1..80: mol_type = other DNA

SEQ ID NO: 65291 - DNA, 80 bp, synthetic construct; identical to SEQ ID NO: 11626
  source 1..80: mol_type = other DNA

SEQ ID NO: 65292 - DNA, 80 bp, synthetic construct; identical to SEQ ID NO: 30922
  source 1..80: mol_type = other DNA

SEQ ID NO: 65293 - DNA, 80 bp, synthetic construct; identical to SEQ ID NO: 30923
  source 1..80: mol_type = other DNA

SEQ ID NO: 65294 - DNA, 80 bp, synthetic construct; identical to SEQ ID NO: 30924
  source 1..80: mol_type = other DNA

SEQ ID NO: 65295 - DNA, 80 bp, synthetic construct; identical to SEQ ID NO: 11627
  source 1..80: mol_type = other DNA

SEQ ID NO: 65296 - DNA, 80 bp, synthetic construct; identical to SEQ ID NO: 30926
  source 1..80: mol_type = other DNA

SEQ ID NO: 65297 - DNA, 80 bp, synthetic construct; identical to SEQ ID NO: 30927
  source 1..80: mol_type = other DNA

SEQ ID NO: 65298 - DNA, 80 bp, synthetic construct; identical to SEQ ID NO: 11628
  source 1..80: mol_type = other DNA

SEQ ID NO: 65299 - DNA, 80 bp, synthetic construct; identical to SEQ ID NO: 30929
  source 1..80: mol_type = other DNA

SEQ ID NO: 65300 - DNA, 80 bp, synthetic construct; identical to SEQ ID NO: 30930
  source 1..80: mol_type = other DNA

SEQ ID NO: 65301 - DNA, 80 bp, synthetic construct; identical to SEQ ID NO: 30931
  source 1..80: mol_type = other DNA

SEQ ID NO: 65302 - DNA, 80 bp, synthetic construct; identical to SEQ ID NO: 30932
  source 1..80: mol_type = other DNA

SEQ ID NO: 65303 - DNA, 80 bp, synthetic construct; identical to SEQ ID NO: 11629
  source 1..80: mol_type = other DNA

SEQ ID NO: 65304 - DNA, 80 bp, synthetic construct; identical to SEQ ID NO: 30934
  source 1..80: mol_type = other DNA

SEQ ID NO: 65305 - DNA, 80 bp, synthetic construct; identical to SEQ ID NO: 30935
  source 1..80: mol_type = other DNA

SEQ ID NO: 65306 - DNA, 80 bp, synthetic construct; identical to SEQ ID NO: 11630
  source 1..80: mol_type = other DNA

SEQ ID NO: 65307 - DNA, 80 bp, synthetic construct; identical to SEQ ID NO: 30937
  source 1..80: mol_type = other DNA

SEQ ID NO: 65308 - DNA, 80 bp, synthetic construct; identical to SEQ ID NO: 30938
  source 1..80: mol_type = other DNA

SEQ ID NO: 65309 - DNA, 80 bp, synthetic construct; identical to SEQ ID NO: 30939
  source 1..80: mol_type = other DNA

SEQ ID NO: 65310 - DNA, 80 bp, synthetic construct; identical to SEQ ID NO: 11631
  source 1..80: mol_type = other DNA

SEQ ID NO: 65311 - DNA, 80 bp, synthetic construct; identical to SEQ ID NO: 30941
  source 1..80: mol_type = other DNA

SEQ ID NO: 65312 - DNA, 80 bp, synthetic construct; identical to SEQ ID NO: 30943
  source 1..80: mol_type = other DNA

SEQ ID NO: 65313 - DNA, 80 bp, synthetic construct; identical to SEQ ID NO: 30944
  source 1..80: mol_type = other DNA

SEQ ID NO: 65314 - DNA, 80 bp, synthetic construct; identical to SEQ ID NO: 11632
  source 1..80: mol_type = other DNA

SEQ ID NO: 65315 - DNA, 80 bp, synthetic construct; identical to SEQ ID NO: 30946
  source 1..80: mol_type = other DNA

SEQ ID NO: 65316 - DNA, 80 bp, synthetic construct; identical to SEQ ID NO: 30947
  source 1..80: mol_type = other DNA

SEQ ID NO: 65317 - DNA, 80 bp, synthetic construct; identical to SEQ ID NO: 30948
  source 1..80: mol_type = other DNA

SEQ ID NO: 65318 - DNA, 80 bp, synthetic construct; identical to SEQ ID NO: 11633
  source 1..80: mol_type = other DNA

SEQ ID NO: 65319 - DNA, 80 bp, synthetic construct; identical to SEQ ID NO: 30950
  source 1..80: mol_type = other DNA

SEQ ID NO: 65320 - DNA, 80 bp, synthetic construct; identical to SEQ ID NO: 30951
  source 1..80: mol_type = other DNA

SEQ ID NO: 65321 - DNA, 80 bp, synthetic construct; identical to SEQ ID NO: 30952
  source 1..80: mol_type = other DNA

SEQ ID NO: 65322 - DNA, 80 bp, synthetic construct; identical to SEQ ID NO: 30953
  source 1..80: mol_type = other DNA

SEQ ID NO: 65323 - DNA, 80 bp, synthetic construct; identical to SEQ ID NO: 11634
  source 1..80: mol_type = other DNA

SEQ ID NO: 65324 - DNA, 80 bp, synthetic construct; identical to SEQ ID NO: 30955
  source 1..80: mol_type = other DNA

SEQ ID NO: 65325 - DNA, 80 bp, synthetic construct; identical to SEQ ID NO: 30956
  source 1..80: mol_type = other DNA

SEQ ID NO: 65326 - DNA, 80 bp, synthetic construct; identical to SEQ ID NO: 11635
  source 1..80: mol_type = other DNA

SEQ ID NO: 65327 - DNA, 80 bp, synthetic construct; identical to SEQ ID NO: 30958
  source 1..80: mol_type = other DNA

SEQ ID NO: 65328 - DNA, 80 bp, synthetic construct; identical to SEQ ID NO: 30959
  source 1..80: mol_type = other DNA

SEQ ID NO: 65329 - DNA, 80 bp, synthetic construct; identical to SEQ ID NO: 30960
  source 1..80: mol_type = other DNA

SEQ ID NO: 65330 - DNA, 80 bp, synthetic construct; identical to SEQ ID NO: 11636
  source 1..80: mol_type = other DNA

SEQ ID NO: 65331 - DNA, 80 bp, synthetic construct; identical to SEQ ID NO: 30962
  source 1..80: mol_type = other DNA

SEQ ID NO: 65332 - DNA, 80 bp, synthetic construct; identical to SEQ ID NO: 30963
  source 1..80: mol_type = other DNA

SEQ ID NO: 65333 - DNA, 80 bp, synthetic construct; identical to SEQ ID NO: 11767
  source 1..80: mol_type = other DNA

SEQ ID NO: 65334 - DNA, 80 bp, synthetic construct; identical to SEQ ID NO: 30965
  source 1..80: mol_type = other DNA

SEQ ID NO: 65335 - DNA, 80 bp, synthetic construct; identical to SEQ ID NO: 11637
  source 1..80: mol_type = other DNA

SEQ ID NO: 65336 - DNA, 80 bp, synthetic construct; identical to SEQ ID NO: 30967
  source 1..80: mol_type = other DNA

SEQ ID NO: 65337 - DNA, 80 bp, synthetic construct; identical to SEQ ID NO: 30968
  source 1..80: mol_type = other DNA

SEQ ID NO: 65338 - DNA, 80 bp, synthetic construct; identical to SEQ ID NO: 11638
  source 1..80: mol_type = other DNA

SEQ ID NO: 65339 - DNA, 80 bp, synthetic construct; identical to SEQ ID NO: 30970
  source 1..80: mol_type = other DNA

SEQ ID NO: 65340 - DNA, 80 bp, synthetic construct; identical to SEQ ID NO: 30972
  source 1..80: mol_type = other DNA

SEQ ID NO: 65341 - DNA, 80 bp, synthetic construct; identical to SEQ ID NO: 11639
  source 1..80: mol_type = other DNA

SEQ ID NO: 65342 - DNA, 80 bp, synthetic construct; identical to SEQ ID NO: 30975
  source 1..80: mol_type = other DNA

SEQ ID NO: 65343 - DNA, 80 bp, synthetic construct; identical to SEQ ID NO: 30976
  source 1..80: mol_type = other DNA

SEQ ID NO: 65344 - DNA, 80 bp, synthetic construct; identical to SEQ ID NO: 30977
  source 1..80: mol_type = other DNA

SEQ ID NO: 65345 - DNA, 80 bp, synthetic construct; identical to SEQ ID NO: 11640
  source 1..80: mol_type = other DNA

SEQ ID NO: 65346 - DNA, 80 bp, synthetic construct; identical to SEQ ID NO: 30979
  source 1..80: mol_type = other DNA

SEQ ID NO: 65347 - DNA, 80 bp, synthetic construct; identical to SEQ ID NO: 30980
  source 1..80: mol_type = other DNA

SEQ ID NO: 65348 - DNA, 80 bp, synthetic construct; identical to SEQ ID NO: 11641
  source 1..80: mol_type = other DNA

SEQ ID NO: 65349 - DNA, 80 bp, synthetic construct; identical to SEQ ID NO: 30982
  source 1..80: mol_type = other DNA

SEQ ID NO: 65350 - DNA, 80 bp, synthetic construct; identical to SEQ ID NO: 30983
  source 1..80: mol_type = other DNA

SEQ ID NO: 65351 - DNA, 80 bp, synthetic construct; identical to SEQ ID NO: 30984
  source 1..80: mol_type = other DNA

SEQ ID NO: 65352 - DNA, 80 bp, synthetic construct; identical to SEQ ID NO: 30985
  source 1..80: mol_type = other DNA

SEQ ID NO: 65353 - DNA, 80 bp, synthetic construct; identical to SEQ ID NO: 11642
  source 1..80: mol_type = other DNA

SEQ ID NO: 65354 - DNA, 80 bp, synthetic construct; identical to SEQ ID NO: 30987
  source 1..80: mol_type = other DNA

SEQ ID NO: 65355 - DNA, 80 bp, synthetic construct; identical to SEQ ID NO: 30989
  source 1..80: mol_type = other DNA

SEQ ID NO: 65356 - DNA, 80 bp, synthetic construct; identical to SEQ ID NO: 11643
  source 1..80: mol_type = other DNA

SEQ ID NO: 65357 - DNA, 80 bp, synthetic construct; identical to SEQ ID NO: 30992
  source 1..80: mol_type = other DNA

SEQ ID NO: 65358 - DNA, 80 bp, synthetic construct; identical to SEQ ID NO: 30994
  source 1..80: mol_type = other DNA

SEQ ID NO: 65359 - DNA, 80 bp, synthetic construct; identical to SEQ ID NO: 30995
  source 1..80: mol_type = other DNA

SEQ ID NO: 65360 - DNA, 80 bp, synthetic construct; identical to SEQ ID NO: 11645
  source 1..80: mol_type = other DNA

SEQ ID NO: 65361 - DNA, 80 bp, synthetic construct; identical to SEQ ID NO: 30999
  source 1..80: mol_type = other DNA

SEQ ID NO: 65362 - DNA, 80 bp, synthetic construct; identical to SEQ ID NO: 31000
  source 1..80: mol_type = other DNA

SEQ ID NO: 65363 - DNA, 80 bp, synthetic construct; identical to SEQ ID NO: 11646
  source 1..80: mol_type = other DNA

SEQ ID NO: 65364 - DNA, 80 bp, synthetic construct; identical to SEQ ID NO: 31002
  source 1..80: mol_type = other DNA

SEQ ID NO: 65365 - DNA, 80 bp, synthetic construct; identical to SEQ ID NO: 31003
  source 1..80: mol_type = other DNA

SEQ ID NO: 65366 - DNA, 80 bp, synthetic construct; identical to SEQ ID NO: 31004
  source 1..80: mol_type = other DNA

SEQ ID NO: 65367 - DNA, 80 bp, synthetic construct; identical to SEQ ID NO: 11647
  source 1..80: mol_type = other DNA

SEQ ID NO: 65368 - DNA, 80 bp, synthetic construct; identical to SEQ ID NO: 31007
  source 1..80: mol_type = other DNA

SEQ ID NO: 65369 - DNA, 80 bp, synthetic construct; identical to SEQ ID NO: 31009
  source 1..80: mol_type = other DNA

SEQ ID NO: 65370 - DNA, 80 bp, synthetic construct; identical to SEQ ID NO: 31012
  source 1..80: mol_type = other DNA

SEQ ID NO: 65371 - DNA, 80 bp, synthetic construct; identical to SEQ ID NO: 31013
  source 1..80: mol_type = other DNA

SEQ ID NO: 65372 - DNA, 80 bp, synthetic construct; identical to SEQ ID NO: 31014
  source 1..80: mol_type = other DNA

SEQ ID NO: 65373 - DNA, 80 bp, synthetic construct; identical to SEQ ID NO: 11649
  source 1..80: mol_type = other DNA

SEQ ID NO: 65374 - DNA, 80 bp, synthetic construct; identical to SEQ ID NO: 31016
  source 1..80: mol_type = other DNA

SEQ ID NO: 65375 - DNA, 80 bp, synthetic construct; identical to SEQ ID NO: 11770
  source 1..80: mol_type = other DNA

SEQ ID NO: 65376 - DNA, 80 bp, synthetic construct; identical to SEQ ID NO: 31018
  source 1..80: mol_type = other DNA

SEQ ID NO: 65377 - DNA, 80 bp, synthetic construct; identical to SEQ ID NO: 31019
  source 1..80: mol_type = other DNA

SEQ ID NO: 65378 - DNA, 80 bp, synthetic construct; identical to SEQ ID NO: 31020
  source 1..80: mol_type = other DNA

SEQ ID NO: 65379 - DNA, 80 bp, synthetic construct; identical to SEQ ID NO: 11771
  source 1..80: mol_type = other DNA

SEQ ID NO: 65380 - DNA, 80 bp, synthetic construct; identical to SEQ ID NO: 31022
  source 1..80: mol_type = other DNA

SEQ ID NO: 65381 - DNA, 80 bp, synthetic construct; identical to SEQ ID NO: 11651
  source 1..80: mol_type = other DNA

SEQ ID NO: 65382 - DNA, 80 bp, synthetic construct; identical to SEQ ID NO: 31025
  source 1..80: mol_type = other DNA

SEQ ID NO: 65383 - DNA, 80 bp, synthetic construct; identical to SEQ ID NO: 31026
  source 1..80: mol_type = other DNA

SEQ ID NO: 65384 - DNA, 80 bp, synthetic construct; identical to SEQ ID NO: 11652
  source 1..80: mol_type = other DNA

SEQ ID NO: 65385 - DNA, 80 bp, synthetic construct; identical to SEQ ID NO: 31029
  source 1..80: mol_type = other DNA

SEQ ID NO: 65386 - DNA, 80 bp, synthetic construct; identical to SEQ ID NO: 31030
  source 1..80: mol_type = other DNA

SEQ ID NO: 65387 - DNA, 80 bp, synthetic construct; identical to SEQ ID NO: 11653
  source 1..80: mol_type = other DNA

SEQ ID NO: 65388 - DNA, 80 bp, synthetic construct; identical to SEQ ID NO: 31034
  source 1..80: mol_type = other DNA

SEQ ID NO: 65389 - DNA, 80 bp, synthetic construct; identical to SEQ ID NO: 11654
  source 1..80: mol_type = other DNA

SEQ ID NO: 65390 - DNA, 80 bp, synthetic construct; identical to SEQ ID NO: 31037
  source 1..80: mol_type = other DNA

SEQ ID NO: 65391 - DNA, 80 bp, synthetic construct; identical to SEQ ID NO: 31038
  source 1..80: mol_type = other DNA

SEQ ID NO: 65392 - DNA, 80 bp, synthetic construct; identical to SEQ ID NO: 31039
  source 1..80: mol_type = other DNA

SEQ ID NO: 65393 - DNA, 80 bp, synthetic construct; identical to SEQ ID NO: 11655
  source 1..80: mol_type = other DNA

SEQ ID NO: 65394 - DNA, 80 bp, synthetic construct; identical to SEQ ID NO: 31041
  source 1..80: mol_type = other DNA

SEQ ID NO: 65395 - DNA, 80 bp, synthetic construct; identical to SEQ ID NO: 31042
  source 1..80: mol_type = other DNA

SEQ ID NO: 65396 - DNA, 80 bp, synthetic construct; identical to SEQ ID NO: 31043
  source 1..80: mol_type = other DNA

SEQ ID NO: 65397 - DNA, 80 bp, synthetic construct; identical to SEQ ID NO: 11656
  source 1..80: mol_type = other DNA

SEQ ID NO: 65398 - DNA, 80 bp, synthetic construct; identical to SEQ ID NO: 31045
  source 1..80: mol_type = other DNA

SEQ ID NO: 65399 - DNA, 80 bp, synthetic construct; identical to SEQ ID NO: 31046
  source 1..80: mol_type = other DNA

SEQ ID NO: 65400 - DNA, 80 bp, synthetic construct; identical to SEQ ID NO: 31047
  source 1..80: mol_type = other DNA

SEQ ID NO: 65401 - DNA, 80 bp, synthetic construct; identical to SEQ ID NO: 11657
  source 1..80: mol_type = other DNA

SEQ ID NO: 65402 - DNA, 80 bp, synthetic construct; identical to SEQ ID NO: 31051
  source 1..80: mol_type = other DNA

SEQ ID NO: 65403 - DNA, 80 bp, synthetic construct; identical to SEQ ID NO: 11658
  source 1..80: mol_type = other DNA

SEQ ID NO: 65404 - DNA, 80 bp, synthetic construct; identical to SEQ ID NO: 31053
  source 1..80: mol_type = other DNA

SEQ ID NO: 65405 - DNA, 80 bp, synthetic construct; identical to SEQ ID NO: 31054
  source 1..80: mol_type = other DNA

SEQ ID NO: 65406 - DNA, 80 bp, synthetic construct; identical to SEQ ID NO: 31055
  source 1..80: mol_type = other DNA

SEQ ID NO: 65407 - DNA, 80 bp, synthetic construct; identical to SEQ ID NO: 11659
  source 1..80: mol_type = other DNA

SEQ ID NO: 65408 - DNA, 80 bp, synthetic construct; identical to SEQ ID NO: 31057
  source 1..80: mol_type = other DNA

SEQ ID NO: 65409 - DNA, 80 bp, synthetic construct; identical to SEQ ID NO: 31058
  source 1..80: mol_type = other DNA

SEQ ID NO: 65410 - DNA, 80 bp, synthetic construct; identical to SEQ ID NO: 31059
  source 1..80: mol_type = other DNA

SEQ ID NO: 65411 - DNA, 80 bp, synthetic construct; identical to SEQ ID NO: 31060
  source 1..80: mol_type = other DNA

SEQ ID NO: 65412 - DNA, 80 bp, synthetic construct; identical to SEQ ID NO: 11660
  source 1..80: mol_type = other DNA

SEQ ID NO: 65413 - DNA, 80 bp, synthetic construct; identical to SEQ ID NO: 31062
  source 1..80: mol_type = other DNA

SEQ ID NO: 65414 - DNA, 80 bp, synthetic construct; identical to SEQ ID NO: 31063
  source 1..80: mol_type = other DNA

SEQ ID NO: 65415 - DNA, 80 bp, synthetic construct; identical to SEQ ID NO: 11661
  source 1..80: mol_type = other DNA

SEQ ID NO: 65416 - DNA, 80 bp, synthetic construct; identical to SEQ ID NO: 31065
  source 1..80: mol_type = other DNA

SEQ ID NO: 65417 - DNA, 80 bp, synthetic construct; identical to SEQ ID NO: 31066
  source 1..80: mol_type = other DNA

SEQ ID NO: 65418 - DNA, 80 bp, synthetic construct; identical to SEQ ID NO: 31067
  source 1..80: mol_type = other DNA

SEQ ID NO: 65419 - DNA, 80 bp, synthetic construct; identical to SEQ ID NO: 31068
  source 1..80: mol_type = other DNA

SEQ ID NO: 65420 - DNA, 80 bp, synthetic construct; identical to SEQ ID NO: 11662
  source 1..80: mol_type = other DNA

SEQ ID NO: 65421 - DNA, 80 bp, synthetic construct; identical to SEQ ID NO: 31070
  source 1..80: mol_type = other DNA

SEQ ID NO: 65422 - DNA, 80 bp, synthetic construct; identical to SEQ ID NO: 31071
  source 1..80: mol_type = other DNA

SEQ ID NO: 65423 - DNA, 80 bp, synthetic construct; identical to SEQ ID NO: 31072
  source 1..80: mol_type = other DNA

SEQ ID NO: 65424 - DNA, 80 bp, synthetic construct; identical to SEQ ID NO: 11663
  source 1..80: mol_type = other DNA

SEQ ID NO: 65425 - DNA, 80 bp, synthetic construct; identical to SEQ ID NO: 31074
  source 1..80: mol_type = other DNA

SEQ ID NO: 65426 - DNA, 80 bp, synthetic construct; identical to SEQ ID NO: 31075
  source 1..80: mol_type = other DNA

SEQ ID NO: 65427 - DNA, 80 bp, synthetic construct; identical to SEQ ID NO: 31076
  source 1..80: mol_type = other DNA

SEQ ID NO: 65428 - DNA, 80 bp, synthetic construct; identical to SEQ ID NO: 11664
  source 1..80: mol_type = other DNA

SEQ ID NO: 65429 - DNA, 80 bp, synthetic construct; identical to SEQ ID NO: 31079
  source 1..80: mol_type = other DNA

SEQ ID NO: 65430 - DNA, 80 bp, synthetic construct; identical to SEQ ID NO: 11665
  source 1..80: mol_type = other DNA

SEQ ID NO: 65431 - DNA, 80 bp, synthetic construct; identical to SEQ ID NO: 31083
  source 1..80: mol_type = other DNA

SEQ ID NO: 65432 - DNA, 80 bp, synthetic construct; identical to SEQ ID NO: 11666
  source 1..80: mol_type = other DNA

SEQ ID NO: 65433 - DNA, 80 bp, synthetic construct; identical to SEQ ID NO: 31087
  source 1..80: mol_type = other DNA

SEQ ID NO: 65434 - DNA, 80 bp, synthetic construct; identical to SEQ ID NO: 31089
  source 1..80: mol_type = other DNA

SEQ ID NO: 65435 - DNA, 80 bp, synthetic construct; identical to SEQ ID NO: 31091
  source 1..80: mol_type = other DNA

SEQ ID NO: 65436 - DNA, 80 bp, synthetic construct; identical to SEQ ID NO: 11668
  source 1..80: mol_type = other DNA

SEQ ID NO: 65437 - DNA, 80 bp, synthetic construct; identical to SEQ ID NO: 31093
  source 1..80: mol_type = other DNA

SEQ ID NO: 65438 - DNA, 80 bp, synthetic construct; identical to SEQ ID NO: 31095
  source 1..80: mol_type = other DNA

SEQ ID NO: 65439 - DNA, 80 bp, synthetic construct; identical to SEQ ID NO: 31096
  source 1..80: mol_type = other DNA

SEQ ID NO: 65440 - DNA, 80 bp, synthetic construct; identical to SEQ ID NO: 31098
  source 1..80: mol_type = other DNA

SEQ ID NO: 65441 - DNA, 80 bp, synthetic construct; identical to SEQ ID NO: 11670
  source 1..80: mol_type = other DNA

SEQ ID NO: 65442 - DNA, 80 bp, synthetic construct; identical to SEQ ID NO: 31101
  source 1..80: mol_type = other DNA

SEQ ID NO: 65443 - DNA, 80 bp, synthetic construct; identical to SEQ ID NO: 31103
  source 1..80: mol_type = other DNA

SEQ ID NO: 65444 - DNA, 80 bp, synthetic construct; identical to SEQ ID NO: 11671
  source 1..80: mol_type = other DNA

SEQ ID NO: 65445 - DNA, 80 bp, synthetic construct; identical to SEQ ID NO: 31106
  source 1..80: mol_type = other DNA

SEQ ID NO: 65446 - DNA, 80 bp, synthetic construct; identical to SEQ ID NO: 11672
  source 1..80: mol_type = other DNA

SEQ ID NO: 65447 - DNA, 80 bp, synthetic construct; identical to SEQ ID NO: 31109
  source 1..80: mol_type = other DNA

SEQ ID NO: 65448 - DNA, 80 bp, synthetic construct; identical to SEQ ID NO: 31111
  source 1..80: mol_type = other DNA

SEQ ID NO: 65449 - DNA, 80 bp, synthetic construct; identical to SEQ ID NO: 11673
  source 1..80: mol_type = other DNA

SEQ ID NO: 65450 - DNA, 80 bp, synthetic construct; identical to SEQ ID NO: 31114
  source 1..80: mol_type = other DNA

SEQ ID NO: 65451 - DNA, 80 bp, synthetic construct; identical to SEQ ID NO: 31116
  source 1..80: mol_type = other DNA

SEQ ID NO: 65452 - DNA, 80 bp, synthetic construct; identical to SEQ ID NO: 11674
  source 1..80: mol_type = other DNA

SEQ ID NO: 65453 - DNA, 80 bp, synthetic construct; identical to SEQ ID NO: 31119
  source 1..80: mol_type = other DNA

SEQ ID NO: 65454 - DNA, 80 bp, synthetic construct; identical to SEQ ID NO: 31120
  source 1..80: mol_type = other DNA

SEQ ID NO: 65455 - DNA, 80 bp, synthetic construct; identical to SEQ ID NO: 31122
  source 1..80: mol_type = other DNA

SEQ ID NO: 65456 - DNA, 80 bp, synthetic construct; identical to SEQ ID NO: 31123
  source 1..80: mol_type = other DNA

SEQ ID NO: 65457 - DNA, 80 bp, synthetic construct; identical to SEQ ID NO: 31124
  source 1..80: mol_type = other DNA

SEQ ID NO: 65458 - DNA, 80 bp, synthetic construct; identical to SEQ ID NO: 31126
  source 1..80: mol_type = other DNA

SEQ ID NO: 65459 - DNA, 80 bp, synthetic construct; identical to SEQ ID NO: 31127
  source 1..80: mol_type = other DNA

SEQ ID NO: 65460 - DNA, 80 bp, synthetic construct; identical to SEQ ID NO: 11677
  source 1..80: mol_type = other DNA

SEQ ID NO: 65461 - DNA, 80 bp, synthetic construct; identical to SEQ ID NO: 31130
  source 1..80: mol_type = other DNA

SEQ ID NO: 65462 - DNA, 80 bp, synthetic construct; identical to SEQ ID NO: 11678
  source 1..80: mol_type = other DNA

SEQ ID NO: 65463 - DNA, 80 bp, synthetic construct; identical to SEQ ID NO: 31133
  source 1..80: mol_type = other DNA

SEQ ID NO: 65464 - DNA, 80 bp, synthetic construct; identical to SEQ ID NO: 31135
  source 1..80: mol_type = other DNA

SEQ ID NO: 65465 - DNA, 80 bp, synthetic construct; identical to SEQ ID NO: 11679
  source 1..80: mol_type = other DNA

SEQ ID NO: 65466 - DNA, 80 bp, synthetic construct; identical to SEQ ID NO: 31137
  source 1..80: mol_type = other DNA

SEQ ID NO: 65467 - DNA, 80 bp, synthetic construct; identical to SEQ ID NO: 31138
  source 1..80: mol_type = other DNA

SEQ ID NO: 65468 - DNA, 80 bp, synthetic construct; identical to SEQ ID NO: 31139
  source 1..80: mol_type = other DNA

SEQ ID NO: 65469 - DNA, 80 bp, synthetic construct; identical to SEQ ID NO: 11680
  source 1..80: mol_type = other DNA

SEQ ID NO: 65470 - DNA, 80 bp, synthetic construct; identical to SEQ ID NO: 31141
  source 1..80: mol_type = other DNA

SEQ ID NO: 65471 - DNA, 80 bp, synthetic construct; identical to SEQ ID NO: 31142
  source 1..80: mol_type = other DNA

SEQ ID NO: 65472 - DNA, 80 bp, synthetic construct; identical to SEQ ID NO: 31143
  source 1..80: mol_type = other DNA

SEQ ID NO: 65473 - DNA, 80 bp, synthetic construct; identical to SEQ ID NO: 11681
  source 1..80: mol_type = other DNA

SEQ ID NO: 65474 - DNA, 80 bp, synthetic construct; identical to SEQ ID NO: 31145
  source 1..80: mol_type = other DNA

SEQ ID NO: 65475 - DNA, 80 bp, synthetic construct; identical to SEQ ID NO: 31146
  source 1..80: mol_type = other DNA

SEQ ID NO: 65476 - DNA, 80 bp, synthetic construct; identical to SEQ ID NO: 31147
  source 1..80: mol_type = other DNA

SEQ ID NO: 65477 - DNA, 80 bp, synthetic construct; identical to SEQ ID NO: 31148
  source 1..80: mol_type = other DNA

SEQ ID NO: 65478 - DNA, 80 bp, synthetic construct; identical to SEQ ID NO: 11682
  source 1..80: mol_type = other DNA

SEQ ID NO: 65479 - DNA, 80 bp, synthetic construct; identical to SEQ ID NO: 31150
  source 1..80: mol_type = other DNA

SEQ ID NO: 65480 - DNA, 80 bp, synthetic construct; identical to SEQ ID NO: 11795
  source 1..80: mol_type = other DNA

SEQ ID NO: 65481 - DNA, 80 bp, synthetic construct; identical to SEQ ID NO: 31152
  source 1..80: mol_type = other DNA

SEQ ID NO: 65482 - DNA, 80 bp, synthetic construct; identical to SEQ ID NO: 31153
  source 1..80: mol_type = other DNA

SEQ ID NO: 65483 - DNA, 80 bp, synthetic construct; identical to SEQ ID NO: 11683
  source 1..80: mol_type = other DNA

SEQ ID NO: 65484 - DNA, 80 bp, synthetic construct; identical to SEQ ID NO: 31155
  source 1..80: mol_type = other DNA

SEQ ID NO: 65485 - DNA, 80 bp, synthetic construct; identical to SEQ ID NO: 31156
  source 1..80: mol_type = other DNA

SEQ ID NO: 65486 - DNA, 80 bp, synthetic construct; identical to SEQ ID NO: 31157
  source 1..80: mol_type = other DNA

SEQ ID NO: 65487 - DNA, 80 bp, synthetic construct; identical to SEQ ID NO: 31158
  source 1..80: mol_type = other DNA

SEQ ID NO: 65488 - DNA, 80 bp, synthetic construct; identical to SEQ ID NO: 11684
  source 1..80: mol_type = other DNA

SEQ ID NO: 65489 - DNA, 80 bp, synthetic construct; identical to SEQ ID NO: 31160
  source 1..80: mol_type = other DNA

SEQ ID NO: 65490 - DNA, 80 bp, synthetic construct; identical to SEQ ID NO: 31161
  source 1..80: mol_type = other DNA

SEQ ID NO: 65491 - DNA, 80 bp, synthetic construct; identical to SEQ ID NO: 11685
  source 1..80: mol_type = other DNA

SEQ ID NO: 65492 - DNA, 80 bp, synthetic construct; identical to SEQ ID NO: 31163
  source 1..80: mol_type = other DNA

SEQ ID NO: 65493 - DNA, 80 bp, synthetic construct; identical to SEQ ID NO: 31164
  source 1..80: mol_type = other DNA

SEQ ID NO: 65494 - DNA, 80 bp, synthetic construct; identical to SEQ ID NO: 31165
  source 1..80: mol_type = other DNA

SEQ ID NO: 65495 - DNA, 80 bp, synthetic construct; identical to SEQ ID NO: 11686
  source 1..80: mol_type = other DNA

SEQ ID NO: 65496 - DNA, 80 bp, synthetic construct; identical to SEQ ID NO: 31168
  source 1..80: mol_type = other DNA

SEQ ID NO: 65497 - DNA, 80 bp, synthetic construct; identical to SEQ ID NO: 31170
  source 1..80: mol_type = other DNA

SEQ ID NO: 65498 - DNA, 80 bp, synthetic construct; identical to SEQ ID NO: 31171
  source 1..80: mol_type = other DNA

SEQ ID NO: 65499 - DNA, 80 bp, synthetic construct; identical to SEQ ID NO: 31173
  source 1..80: mol_type = other DNA

SEQ ID NO: 65500 - DNA, 80 bp, synthetic construct; identical to SEQ ID NO: 31175
  source 1..80: mol_type = other DNA

SEQ ID NO: 65501 - DNA, 80 bp, synthetic construct; identical to SEQ ID NO: 11688
  source 1..80: mol_type = other DNA

SEQ ID NO: 65502 - DNA, 80 bp, synthetic construct; identical to SEQ ID NO: 31178
  source 1..80: mol_type = other DNA

SEQ ID NO: 65503 - DNA, 80 bp, synthetic construct; identical to SEQ ID NO: 31179
  source 1..80: mol_type = other DNA

SEQ ID NO: 65504 - DNA, 80 bp, synthetic construct; identical to SEQ ID NO: 31181
  source 1..80: mol_type = other DNA

SEQ ID NO: 65505 - DNA, 80 bp, synthetic construct; identical to SEQ ID NO: 31182
  source 1..80: mol_type = other DNA

SEQ ID NO: 65506 - DNA, 80 bp, synthetic construct; identical to SEQ ID NO: 31183
  source 1..80: mol_type = other DNA

SEQ ID NO: 65507 - DNA, 80 bp, synthetic construct; identical to SEQ ID NO: 31184
  source 1..80: mol_type = other DNA

SEQ ID NO: 65508 - DNA, 80 bp, synthetic construct; identical to SEQ ID NO: 11690
  source 1..80: mol_type = other DNA

SEQ ID NO: 65509 - DNA, 80 bp, synthetic construct; identical to SEQ ID NO: 31186
  source 1..80: mol_type = other DNA

SEQ ID NO: 65510 - DNA, 80 bp, synthetic construct; identical to SEQ ID NO: 31187
  source 1..80: mol_type = other DNA

SEQ ID NO: 65511 - DNA, 80 bp, synthetic construct; identical to SEQ ID NO: 31188
  source 1..80: mol_type = other DNA

SEQ ID NO: 65512 - DNA, 80 bp, synthetic construct; identical to SEQ ID NO: 31189
  source 1..80: mol_type = other DNA

SEQ ID NO: 65513 - DNA, 80 bp, synthetic construct; identical to SEQ ID NO: 31190
  source 1..80: mol_type = other DNA

SEQ ID NO: 65514 - DNA, 80 bp, synthetic construct; identical to SEQ ID NO: 31191
  source 1..80: mol_type = other DNA

SEQ ID NO: 65515 - DNA, 80 bp, synthetic construct; identical to SEQ ID NO: 31192
  source 1..80: mol_type = other DNA

SEQ ID NO: 65516 - DNA, 80 bp, synthetic construct; identical to SEQ ID NO: 31193
  source 1..80: mol_type = other DNA

SEQ ID NO: 65517 - DNA, 80 bp, synthetic construct; identical to SEQ ID NO: 31194
  source 1..80: mol_type = other DNA

SEQ ID NO: 65518 - DNA, 80 bp, synthetic construct; identical to SEQ ID NO: 11692
  source 1..80: mol_type = other DNA

SEQ ID NO: 65519 - DNA, 80 bp, synthetic construct; identical to SEQ ID NO: 31196
  source 1..80: mol_type = other DNA

SEQ ID NO: 65520 - DNA, 80 bp, synthetic construct; identical to SEQ ID NO: 31197
  source 1..80: mol_type = other DNA

SEQ ID NO: 65521 - DNA, 80 bp, synthetic construct; identical to SEQ ID NO: 11693
  source 1..80: mol_type = other DNA

SEQ ID NO: 65522 - DNA, 80 bp, synthetic construct; identical to SEQ ID NO: 31201
  source 1..80: mol_type = other DNA

SEQ ID NO: 65523 - DNA, 80 bp, synthetic construct; identical to SEQ ID NO: 31203
  source 1..80: mol_type = other DNA

SEQ ID NO: 65524 - DNA, 80 bp, synthetic construct; identical to SEQ ID NO: 31205
  source 1..80: mol_type = other DNA

SEQ ID NO: 65525 - DNA, 80 bp, synthetic construct; identical to SEQ ID NO: 31207
  source 1..80: mol_type = other DNA

SEQ ID NO: 65526 - DNA, 80 bp, synthetic construct; identical to SEQ ID NO: 11695
  source 1..80: mol_type = other DNA

SEQ ID NO: 65527 - DNA, 80 bp, synthetic construct; identical to SEQ ID NO: 31211
  source 1..80: mol_type = other DNA

SEQ ID NO: 65528 - DNA, 80 bp, synthetic construct; identical to SEQ ID NO: 31213
  source 1..80: mol_type = other DNA

SEQ ID NO: 65529 - DNA, 80 bp, synthetic construct; identical to SEQ ID NO: 11696
  source 1..80: mol_type = other DNA

SEQ ID NO: 65530 - DNA, 80 bp, synthetic construct; identical to SEQ ID NO: 31215
  source 1..80: mol_type = other DNA

SEQ ID NO: 65531 - DNA, 80 bp, synthetic construct; identical to SEQ ID NO: 31216
  source 1..80: mol_type = other DNA

SEQ ID NO: 65532 - DNA, 80 bp, synthetic construct; identical to SEQ ID NO: 31217
  source 1..80: mol_type = other DNA

SEQ ID NO: 65533 - DNA, 80 bp, synthetic construct; identical to SEQ ID NO: 11697
  source 1..80: mol_type = other DNA

SEQ ID NO: 65534 - DNA, 80 bp, synthetic construct; identical to SEQ ID NO: 31219
  source 1..80: mol_type = other DNA

SEQ ID NO: 65535 - DNA, 80 bp, synthetic construct; identical to SEQ ID NO: 31220
  source 1..80: mol_type = other DNA

SEQ ID NO: 65536 - DNA, 80 bp, synthetic construct; identical to SEQ ID NO: 31221
  source 1..80: mol_type = other DNA

SEQ ID NO: 65537 - DNA, 80 bp, synthetic construct; identical to SEQ ID NO: 11698
  source 1..80: mol_type = other DNA

SEQ ID NO: 65538 - DNA, 80 bp, synthetic construct; identical to SEQ ID NO: 31223
  source 1..80: mol_type = other DNA

SEQ ID NO: 65539 - DNA, 80 bp, synthetic construct; identical to SEQ ID NO: 31224
  source 1..80: mol_type = other DNA

SEQ ID NO: 65540 - DNA, 80 bp, synthetic construct; identical to SEQ ID NO: 11699
  source 1..80: mol_type = other DNA

SEQ ID NO: 65541 - DNA, 80 bp, synthetic construct; identical to SEQ ID NO: 31226
  source 1..80: mol_type = other DNA

SEQ ID NO: 65542 - DNA, 80 bp, synthetic construct; identical to SEQ ID NO: 31227
  source 1..80: mol_type = other DNA

SEQ ID NO: 65543 - DNA, 80 bp, synthetic construct; identical to SEQ ID NO: 31228
  source 1..80: mol_type = other DNA

SEQ ID NO: 65544 - DNA, 80 bp, synthetic construct; identical to SEQ ID NO: 31229
  source 1..80: mol_type = other DNA

SEQ ID NO: 65545 - DNA, 80 bp, synthetic construct; identical to SEQ ID NO: 31230
  source 1..80: mol_type = other DNA

SEQ ID NO: 65546 - DNA, 80 bp, synthetic construct; identical to SEQ ID NO: 31231
  source 1..80: mol_type = other DNA

SEQ ID NO: 65547 - DNA, 80 bp, synthetic construct; identical to SEQ ID NO: 31232
  source 1..80: mol_type = other DNA

SEQ ID NO: 65548 - DNA, 80 bp, synthetic construct; identical to SEQ ID NO: 31234
  source 1..80: mol_type = other DNA

SEQ ID NO: 65549 - DNA, 80 bp, synthetic construct; identical to SEQ ID NO: 31236
  source 1..80: mol_type = other DNA

SEQ ID NO: 65550 - DNA, 80 bp, synthetic construct; identical to SEQ ID NO: 11702
  source 1..80: mol_type = other DNA

SEQ ID NO: 65551 - DNA, 80 bp, synthetic construct; identical to SEQ ID NO: 31240
  source 1..80: mol_type = other DNA

SEQ ID NO: 65552 - DNA, 80 bp, synthetic construct; identical to SEQ ID NO: 11703
  source 1..80: mol_type = other DNA

SEQ ID NO: 65553 - DNA, 80 bp, synthetic construct; identical to SEQ ID NO: 31244
  source 1..80: mol_type = other DNA

SEQ ID NO: 65554 - DNA, 80 bp, synthetic construct; identical to SEQ ID NO: 31246
  source 1..80: mol_type = other DNA

SEQ ID NO: 65555 - DNA, 80 bp, synthetic construct; identical to SEQ ID NO: 31248
  source 1..80: mol_type = other DNA

SEQ ID NO: 65556 - DNA, 80 bp, synthetic construct; identical to SEQ ID NO: 31249
  source 1..80: mol_type = other DNA

SEQ ID NO: 65557 - DNA, 80 bp, synthetic construct; identical to SEQ ID NO: 11705
  source 1..80: mol_type = other DNA

SEQ ID NO: 65558 - DNA, 80 bp, synthetic construct; identical to SEQ ID NO: 31252
  source 1..80: mol_type = other DNA

SEQ ID NO: 65559 - DNA, 80 bp, synthetic construct; identical to SEQ ID NO: 31254
  source 1..80: mol_type = other DNA

SEQ ID NO: 65560 - DNA, 80 bp, synthetic construct; identical to SEQ ID NO: 31256
  source 1..80: mol_type = other DNA

SEQ ID NO: 65561 - DNA, 80 bp, synthetic construct; identical to SEQ ID NO: 31257
  source 1..80: mol_type = other DNA

SEQ ID NO: 65562 - DNA, 80 bp, synthetic construct; identical to SEQ ID NO: 31258
  source 1..80: mol_type = other DNA

SEQ ID NO: 65563 - DNA, 80 bp, synthetic construct; identical to SEQ ID NO: 31259
  source 1..80: mol_type = other DNA

SEQ ID NO: 65564 - DNA, 80 bp, synthetic construct; identical to SEQ ID NO: 11707
  source 1..80: mol_type = other DNA

SEQ ID NO: 65565 - DNA, 80 bp, synthetic construct; identical to SEQ ID NO: 31261
  source 1..80: mol_type = other DNA

SEQ ID NO: 65566 - DNA, 80 bp, synthetic construct; identical to SEQ ID NO: 31262
  source 1..80: mol_type = other DNA

SEQ ID NO: 65567 - DNA, 80 bp, synthetic construct; identical to SEQ ID NO: 31263
  source 1..80: mol_type = other DNA

SEQ ID NO: 65568 - DNA, 80 bp, synthetic construct; identical to SEQ ID NO: 11708
  source 1..80: mol_type = other DNA

SEQ ID NO: 65569 - DNA, 80 bp, synthetic construct; identical to SEQ ID NO: 31265
  source 1..80: mol_type = other DNA

SEQ ID NO: 65570 - DNA, 80 bp, synthetic construct; identical to SEQ ID NO: 31266
  source 1..80: mol_type = other DNA

SEQ ID NO: 65571 - DNA, 80 bp, synthetic construct; identical to SEQ ID NO: 11809
  source 1..80: mol_type = other DNA

SEQ ID NO: 65572 - DNA, 80 bp, synthetic construct; identical to SEQ ID NO: 31268
  source 1..80: mol_type = other DNA

SEQ ID NO: 65573 - DNA, 80 bp, synthetic construct; identical to SEQ ID NO: 11709
  source 1..80: mol_type = other DNA

SEQ ID NO: 65574 - DNA, 80 bp, synthetic construct; identical to SEQ ID NO: 31270
  source 1..80: mol_type = other DNA

SEQ ID NO: 65575 - DNA, 80 bp, synthetic construct; identical to SEQ ID NO: 31271
  source 1..80: mol_type = other DNA

SEQ ID NO: 65576 - DNA, 80 bp, synthetic construct; identical to SEQ ID NO: 31272
  source 1..80: mol_type = other DNA

SEQ ID NO: 65577 - DNA, 80 bp, synthetic construct; identical to SEQ ID NO: 11710
  source 1..80: mol_type = other DNA

SEQ ID NO: 65578 - DNA, 80 bp, synthetic construct; identical to SEQ ID NO: 31276
  source 1..80: mol_type = other DNA

SEQ ID NO: 65579 - DNA, 80 bp, synthetic construct; identical to SEQ ID NO: 31278
  source 1..80: mol_type = other DNA

SEQ ID NO: 65580 - DNA, 80 bp, synthetic construct; identical to SEQ ID NO: 31279
  source 1..80: mol_type = other DNA

SEQ ID NO: 65581 - DNA, 80 bp, synthetic construct; identical to SEQ ID NO: 31280
  source 1..80: mol_type = other DNA

SEQ ID NO: 65582 - DNA, 80 bp, synthetic construct; identical to SEQ ID NO: 11712
  source 1..80: mol_type = other DNA

SEQ ID NO: 65583 - DNA, 80 bp, synthetic construct; identical to SEQ ID NO: 31282
  source 1..80: mol_type = other DNA

SEQ ID NO: 65584 - DNA, 80 bp, synthetic construct; identical to SEQ ID NO: 31283
  source 1..80: mol_type = other DNA

SEQ ID NO: 65585 - DNA, 80 bp, synthetic construct; identical to SEQ ID NO: 31284
  source 1..80: mol_type = other DNA

SEQ ID NO: 65586 - DNA, 80 bp, synthetic construct; identical to SEQ ID NO: 31285
  source 1..80: mol_type = other DNA

SEQ ID NO: 65587 - DNA, 80 bp, synthetic construct; identical to SEQ ID NO: 11713
  source 1..80: mol_type = other DNA

SEQ ID NO: 65588 - DNA, 80 bp, synthetic construct; identical to SEQ ID NO: 31287
  source 1..80: mol_type = other DNA

SEQ ID NO: 65589 - DNA, 80 bp, synthetic construct; identical to SEQ ID NO: 31288
  source 1..80: mol_type = other DNA

SEQ ID NO: 65590 - DNA, 80 bp, synthetic construct; identical to SEQ ID NO: 31289
  source 1..80: mol_type = other DNA

SEQ ID NO: 65591 - DNA, 80 bp, synthetic construct; identical to SEQ ID NO: 11714
  source 1..80: mol_type = other DNA

SEQ ID NO: 65592 - DNA, 80 bp, synthetic construct; identical to SEQ ID NO: 31291
  source 1..80: mol_type = other DNA

SEQ ID NO: 65593 - DNA, 80 bp, synthetic construct; identical to SEQ ID NO: 31292
  source 1..80: mol_type = other DNA

SEQ ID NO: 65594 - DNA, 80 bp, synthetic construct; identical to SEQ ID NO: 11715
  source 1..80: mol_type = other DNA

SEQ ID NO: 65595 - DNA, 80 bp, synthetic construct; identical to SEQ ID NO: 31294
  source 1..80: mol_type = other DNA

SEQ ID NO: 65596 - DNA, 80 bp, synthetic construct; identical to SEQ ID NO: 31295
  source 1..80: mol_type = other DNA

SEQ ID NO: 65597 - DNA, 80 bp, synthetic construct; identical to SEQ ID NO: 31296
  source 1..80: mol_type = other DNA

SEQ ID NO: 65598 - DNA, 80 bp, synthetic construct; identical to SEQ ID NO: 11716
  source 1..80: mol_type = other DNA

SEQ ID NO: 65599 - DNA, 80 bp, synthetic construct; identical to SEQ ID NO: 31298
  source 1..80: mol_type = other DNA

SEQ ID NO: 65600 - DNA, 80 bp, synthetic construct; identical to SEQ ID NO: 31299
  source 1..80: mol_type = other DNA

SEQ ID NO: 65601 - DNA, 80 bp, synthetic construct; identical to SEQ ID NO: 31300
  source 1..80: mol_type = other DNA

SEQ ID NO: 65602 - DNA, 80 bp, synthetic construct; identical to SEQ ID NO: 11717
  source 1..80: mol_type = other DNA

SEQ ID NO: 65603 - DNA, 80 bp, synthetic construct; identical to SEQ ID NO: 31303
  source 1..80: mol_type = other DNA

SEQ ID NO: 65604 - DNA, 80 bp, synthetic construct; identical to SEQ ID NO: 31304
  source 1..80: mol_type = other DNA

SEQ ID NO: 65605 - DNA, 80 bp, synthetic construct; identical to SEQ ID NO: 11718
  source 1..80: mol_type = other DNA

SEQ ID NO: 65606 - DNA, 80 bp, synthetic construct; identical to SEQ ID NO: 31306
  source 1..80: mol_type = other DNA

SEQ ID NO: 65607 - DNA, 80 bp, synthetic construct; identical to SEQ ID NO: 31307
  source 1..80: mol_type = other DNA

SEQ ID NO: 65608 - DNA, 80 bp, synthetic construct; identical to SEQ ID NO: 31308
  source 1..80: mol_type = other DNA

SEQ ID NO: 65609 - DNA, 80 bp, synthetic construct; identical to SEQ ID NO: 31309
  source 1..80: mol_type = other DNA

SEQ ID NO: 65610 - DNA, 80 bp, synthetic construct; identical to SEQ ID NO: 11719
  source 1..80: mol_type = other DNA

SEQ ID NO: 65611 - DNA, 80 bp, synthetic construct; identical to SEQ ID NO: 31311
  source 1..80: mol_type = other DNA

SEQ ID NO: 65612 - DNA, 80 bp, synthetic construct; identical to SEQ ID NO: 31312
  source 1..80: mol_type = other DNA

SEQ ID NO: 65613 - DNA, 80 bp, synthetic construct; identical to SEQ ID NO: 31313
  source 1..80: mol_type = other DNA

SEQ ID NO: 65614 - DNA, 80 bp, synthetic construct; identical to SEQ ID NO: 31314
  source 1..80: mol_type = other DNA

SEQ ID NO: 65615 - DNA, 80 bp, synthetic construct; identical to SEQ ID NO: 31315
  source 1..80: mol_type = other DNA

SEQ ID NO: 65616 - DNA, 80 bp, synthetic construct; identical to SEQ ID NO: 31316
  source 1..80: mol_type = other DNA

SEQ ID NO: 65617 - DNA, 80 bp, synthetic construct; identical to SEQ ID NO: 31317
  source 1..80: mol_type = other DNA

SEQ ID NO: 65618 - DNA, 80 bp, synthetic construct; identical to SEQ ID NO: 11721
  source 1..80: mol_type = other DNA

SEQ ID NO: 65619 - DNA, 80 bp, synthetic construct; identical to SEQ ID NO: 31319
  source 1..80: mol_type = other DNA

SEQ ID NO: 65620 - DNA, 80 bp, synthetic construct; identical to SEQ ID NO: 31320
  source 1..80: mol_type = other DNA

SEQ ID NO: 65621 - DNA, 80 bp, synthetic construct; identical to SEQ ID NO: 31321
  source 1..80: mol_type = other DNA

SEQ ID NO: 65622 - DNA, 80 bp, synthetic construct; identical to SEQ ID NO: 31322
  source 1..80: mol_type = other DNA

SEQ ID NO: 65623 - DNA, 80 bp, synthetic construct; identical to SEQ ID NO: 11722
  source 1..80: mol_type = other DNA

SEQ ID NO: 65624 - DNA, 80 bp, synthetic construct; identical to SEQ ID NO: 31324
  source 1..80: mol_type = other DNA

SEQ ID NO: 65625 - DNA, 80 bp, synthetic construct; identical to SEQ ID NO: 31325
  source 1..80: mol_type = other DNA

SEQ ID NO: 65626 - DNA, 80 bp, synthetic construct; identical to SEQ ID NO: 31326
  source 1..80: mol_type = other DNA

SEQ ID NO: 65627 - DNA, 80 bp, synthetic construct; identical to SEQ ID NO: 11723
  source 1..80: mol_type = other DNA

SEQ ID NO: 65628 - DNA, 80 bp, synthetic construct; identical to SEQ ID NO: 31328
  source 1..80: mol_type = other DNA

SEQ ID NO: 65629 - DNA, 80 bp, synthetic construct; identical to SEQ ID NO: 31329
  source 1..80: mol_type = other DNA

SEQ ID NO: 65630 - DNA, 80 bp, synthetic construct; identical to SEQ ID NO: 11724
  source 1..80: mol_type = other DNA

SEQ ID NO: 65631 - DNA, 80 bp, synthetic construct; identical to SEQ ID NO: 31333
  source 1..80: mol_type = other DNA

SEQ ID NO: 65632 - DNA, 80 bp, synthetic construct; identical to SEQ ID NO: 31335
  source 1..80: mol_type = other DNA

SEQ ID NO: 65633 - DNA, 80 bp, synthetic construct; identical to SEQ ID NO: 31336
  source 1..80: mol_type = other DNA

SEQ ID NO: 65634 - DNA, 80 bp, synthetic construct; identical to SEQ ID NO: 31337
  source 1..80: mol_type = other DNA

SEQ ID NO: 65635 - DNA, 80 bp, synthetic construct; identical to SEQ ID NO: 11726
  source 1..80: mol_type = other DNA

SEQ ID NO: 65636 - DNA, 80 bp, synthetic construct; identical to SEQ ID NO: 31340
  source 1..80: mol_type = other DNA

SEQ ID NO: 65637 - DNA, 80 bp, synthetic construct; identical to SEQ ID NO: 31341
  source 1..80: mol_type = other DNA

SEQ ID NO: 65638 - DNA, 80 bp, synthetic construct; identical to SEQ ID NO: 31342
  source 1..80: mol_type = other DNA

SEQ ID NO: 65639 - DNA, 80 bp, synthetic construct; identical to SEQ ID NO: 11727
  source 1..80: mol_type = other DNA

SEQ ID NO: 65640 - DNA, 80 bp, synthetic construct; identical to SEQ ID NO: 31344
  source 1..80: mol_type = other DNA

SEQ ID NO: 65641 - DNA, 80 bp, synthetic construct; identical to SEQ ID NO: 31345
  source 1..80: mol_type = other DNA

SEQ ID NO: 65642 - DNA, 80 bp, synthetic construct; identical to SEQ ID NO: 11728
  source 1..80: mol_type = other DNA

SEQ ID NO: 65643 - DNA, 80 bp, synthetic construct; identical to SEQ ID NO: 31348
  source 1..80: mol_type = other DNA

SEQ ID NO: 65644 - DNA, 80 bp, synthetic construct; identical to SEQ ID NO: 31349
  source 1..80: mol_type = other DNA

SEQ ID NO: 65645 - DNA, 80 bp, synthetic construct; identical to SEQ ID NO: 31350
  source 1..80: mol_type = other DNA

SEQ ID NO: 65646 - DNA, 80 bp, synthetic construct; identical to SEQ ID NO: 31351
  source 1..80: mol_type = other DNA

SEQ ID NO: 65647 - DNA, 80 bp, synthetic construct; identical to SEQ ID NO: 11729
  source 1..80: mol_type = other DNA

SEQ ID NO: 65648 - DNA, 80 bp, synthetic construct; identical to SEQ ID NO: 31353
  source 1..80: mol_type = other DNA

SEQ ID NO: 65649 - DNA, 80 bp, synthetic construct; identical to SEQ ID NO: 31354
  source 1..80: mol_type = other DNA

SEQ ID NO: 65650 - DNA, 80 bp, synthetic construct; identical to SEQ ID NO: 31355
  source 1..80: mol_type = other DNA

SEQ ID NO: 65651 - DNA, 80 bp, synthetic construct; identical to SEQ ID NO: 11730
  source 1..80: mol_type = other DNA

SEQ ID NO: 65652 - DNA, 80 bp, synthetic construct; identical to SEQ ID NO: 31358
  source 1..80: mol_type = other DNA

SEQ ID NO: 65653 - DNA, 80 bp, synthetic construct; identical to SEQ ID NO: 11731
  source 1..80: mol_type = other DNA

SEQ ID NO: 65654 - DNA, 80 bp, synthetic construct; identical to SEQ ID NO: 31361
  source 1..80: mol_type = other DNA

SEQ ID NO: 65655 - DNA, 80 bp, synthetic construct; identical to SEQ ID NO: 31362
  source 1..80: mol_type = other DNA

SEQ ID NO: 65656 - DNA, 80 bp, synthetic construct; identical to SEQ ID NO: 11732
  source 1..80: mol_type = other DNA

SEQ ID NO: 65657 - DNA, 80 bp, synthetic construct; identical to SEQ ID NO: 31364
  source 1..80: mol_type = other DNA

SEQ ID NO: 65658 - DNA, 80 bp, synthetic construct; identical to SEQ ID NO: 31365
  source 1..80: mol_type = other DNA

SEQ ID NO: 65659 - DNA, 80 bp, synthetic construct; identical to SEQ ID NO: 31366
  source 1..80: mol_type = other DNA

SEQ ID NO: 65660 - DNA, 80 bp, synthetic construct; identical to SEQ ID NO: 31367
  source 1..80: mol_type = other DNA

SEQ ID NO: 65661 - DNA, 80 bp, synthetic construct; identical to SEQ ID NO: 31368
  source 1..80: mol_type = other DNA

SEQ ID NO: 65662 - DNA, 80 bp, synthetic construct; identical to SEQ ID NO: 31369
  source 1..80: mol_type = other DNA

SEQ ID NO: 65663 - DNA, 80 bp, synthetic construct; identical to SEQ ID NO: 11733
  source 1..80: mol_type = other DNA

SEQ ID NO: 65664 - DNA, 80 bp, synthetic construct; identical to SEQ ID NO: 31371
  source 1..80: mol_type = other DNA

SEQ ID NO: 65665 - DNA, 80 bp, synthetic construct; identical to SEQ ID NO: 31372
  source 1..80: mol_type = other DNA

SEQ ID NO: 65666 - DNA, 80 bp, synthetic construct; identical to SEQ ID NO: 11734
  source 1..80: mol_type = other DNA

SEQ ID NO: 65667 - DNA, 80 bp, synthetic construct; identical to SEQ ID NO: 31374
  source 1..80: mol_type = other DNA

SEQ ID NO: 65668 - DNA, 80 bp, synthetic construct; identical to SEQ ID NO: 31375
  source 1..80: mol_type = other DNA

SEQ ID NO: 65669 - DNA, 80 bp, synthetic construct; identical to SEQ ID NO: 11735
  source 1..80: mol_type = other DNA

SEQ ID NO: 65670 - DNA, 80 bp, synthetic construct; identical to SEQ ID NO: 31377
  source 1..80: mol_type = other DNA

SEQ ID NO: 65671 - DNA, 80 bp, synthetic construct; identical to SEQ ID NO: 31378
  source 1..80: mol_type = other DNA

SEQ ID NO: 65672 - DNA, 80 bp, synthetic construct; identical to SEQ ID NO: 31379
  source 1..80: mol_type = other DNA

SEQ ID NO: 65673 - DNA, 80 bp, synthetic construct; identical to SEQ ID NO: 11736
  source 1..80: mol_type = other DNA

SEQ ID NO: 65674 - DNA, 80 bp, synthetic construct; identical to SEQ ID NO: 31381
  source 1..80: mol_type = other DNA

SEQ ID NO: 65675 - DNA, 80 bp, synthetic construct; identical to SEQ ID NO: 31382
  source 1..80: mol_type = other DNA

SEQ ID NO: 65676 - DNA, 80 bp, synthetic construct; identical to SEQ ID NO: 31383
  source 1..80: mol_type = other DNA

SEQ ID NO: 65677 - DNA, 80 bp, synthetic construct; identical to SEQ ID NO: 11737
  source 1..80: mol_type = other DNA

SEQ ID NO: 65678 - DNA, 80 bp, synthetic construct; identical to SEQ ID NO: 31385
  source 1..80: mol_type = other DNA

SEQ ID NO: 65679 - DNA, 80 bp, synthetic construct; identical to SEQ ID NO: 31386
  source 1..80: mol_type = other DNA

SEQ ID NO: 65680 - DNA, 80 bp, synthetic construct; identical to SEQ ID NO: 11738
  source 1..80: mol_type = other DNA

SEQ ID NO: 65681 - DNA, 80 bp, synthetic construct; identical to SEQ ID NO: 31389
  source 1..80: mol_type = other DNA

SEQ ID NO: 65682 - DNA, 80 bp, synthetic construct; identical to SEQ ID NO: 31390
  source 1..80: mol_type = other DNA

SEQ ID NO: 65683 - DNA, 80 bp, synthetic construct; identical to SEQ ID NO: 31391
  source 1..80: mol_type = other DNA

SEQ ID NO: 65684 - DNA, 80 bp, synthetic construct; identical to SEQ ID NO: 11739
  source 1..80: mol_type = other DNA

SEQ ID NO: 65685 - DNA, 80 bp, synthetic construct; identical to SEQ ID NO: 31393
  source 1..80: mol_type = other DNA

SEQ ID NO: 65686 - DNA, 80 bp, synthetic construct; identical to SEQ ID NO: 31394
  source 1..80: mol_type = other DNA

SEQ ID NO: 65687 - DNA, 80 bp, synthetic construct; identical to SEQ ID NO: 31395
  source 1..80: mol_type = other DNA

SEQ ID NO: 65688 - DNA, 80 bp, synthetic construct; identical to SEQ ID NO: 11740
  source 1..80: mol_type = other DNA

SEQ ID NO: 65689 - DNA, 80 bp, synthetic construct; identical to SEQ ID NO: 31397
  source 1..80: mol_type = other DNA

SEQ ID NO: 65690 - DNA, 80 bp, synthetic construct; identical to SEQ ID NO: 31398
  source 1..80: mol_type = other DNA

SEQ ID NO: 65691 - DNA, 80 bp, synthetic construct; identical to SEQ ID NO: 31399
  source 1..80: mol_type = other DNA

SEQ ID NO: 65692 - DNA, 80 bp, synthetic construct; identical to SEQ ID NO: 11741
  source 1..80: mol_type = other DNA

SEQ ID NO: 65693 - DNA, 80 bp, synthetic construct; identical to SEQ ID NO: 31401
  source 1..80: mol_type = other DNA

SEQ ID NO: 65694 - DNA, 80 bp, synthetic construct; identical to SEQ ID NO: 31402
  source 1..80: mol_type = other DNA

SEQ ID NO: 65695 - DNA, 80 bp, synthetic construct; identical to SEQ ID NO: 31403
  source 1..80: mol_type = other DNA

SEQ ID NO: 65696 - DNA, 80 bp, synthetic construct; identical to SEQ ID NO: 31404
  source 1..80: mol_type = other DNA

SEQ ID NO: 65697 - DNA, 80 bp, synthetic construct; identical to SEQ ID NO: 11742
  source 1..80: mol_type = other DNA

SEQ ID NO: 65698 - DNA, 80 bp, synthetic construct; identical to SEQ ID NO: 31406
  source 1..80: mol_type = other DNA

SEQ ID NO: 65699 - DNA, 80 bp, synthetic construct; identical to SEQ ID NO: 31407
  source 1..80: mol_type = other DNA

SEQ ID NO: 65700 - DNA, 80 bp, synthetic construct; identical to SEQ ID NO: 31408
  source 1..80: mol_type = other DNA

SEQ ID NO: 65701 - DNA, 80 bp, synthetic construct; identical to SEQ ID NO: 11743
  source 1..80: mol_type = other DNA

SEQ ID NO: 65702 - DNA, 80 bp, synthetic construct; identical to SEQ ID NO: 31410
  source 1..80: mol_type = other DNA

SEQ ID NO: 65703 - DNA, 80 bp, synthetic construct; identical to SEQ ID NO: 31411
  source 1..80: mol_type = other DNA

SEQ ID NO: 65704 - DNA, 80 bp, synthetic construct; identical to SEQ ID NO: 31412
  source 1..80: mol_type = other DNA

SEQ ID NO: 65705 - DNA, 80 bp, synthetic construct; identical to SEQ ID NO: 11744
  source 1..80: mol_type = other DNA

SEQ ID NO: 65706 - DNA, 80 bp, synthetic construct; identical to SEQ ID NO: 31414
  source 1..80: mol_type = other DNA

SEQ ID NO: 65707 - DNA, 80 bp, synthetic construct; identical to SEQ ID NO: 31415
  source 1..80: mol_type = other DNA

SEQ ID NO: 65708 - DNA, 80 bp, synthetic construct; identical to SEQ ID NO: 31416
  source 1..80: mol_type = other DNA

SEQ ID NO: 65709 - DNA, 80 bp, synthetic construct; identical to SEQ ID NO: 31417
  source 1..80: mol_type = other DNA

SEQ ID NO: 65710 - DNA, 80 bp, synthetic construct; identical to SEQ ID NO: 11745
  source 1..80: mol_type = other DNA

SEQ ID NO: 65711 - DNA, 80 bp, synthetic construct; identical to SEQ ID NO: 31419
  source 1..80: mol_type = other DNA

SEQ ID NO: 65712 - DNA, 80 bp, synthetic construct; identical to SEQ ID NO: 31421
  source 1..80: mol_type = other DNA

SEQ ID NO: 65713 - DNA, 80 bp, synthetic construct; identical to SEQ ID NO: 11746
  source 1..80: mol_type = other DNA

SEQ ID NO: 65714 - DNA, 80 bp, synthetic construct; identical to SEQ ID NO: 31423
  source 1..80: mol_type = other DNA

SEQ ID NO: 65715 - DNA, 80 bp, synthetic construct; identical to SEQ ID NO: 31424
  source 1..80: mol_type = other DNA

SEQ ID NO: 65716 - DNA, 80 bp, synthetic construct; identical to SEQ ID NO: 31425
  source 1..80: mol_type = other DNA

SEQ ID NO: 65717 - DNA, 80 bp, synthetic construct; identical to SEQ ID NO: 31426
  source 1..80: mol_type = other DNA

SEQ ID NO: 65718 - DNA, 80 bp, synthetic construct; identical to SEQ ID NO: 11747
  source 1..80: mol_type = other DNA

SEQ ID NO: 65719 - DNA, 80 bp, synthetic construct; identical to SEQ ID NO: 31428
  source 1..80: mol_type = other DNA

SEQ ID NO: 65720 - DNA, 80 bp, synthetic construct; identical to SEQ ID NO: 31429
  source 1..80: mol_type = other DNA

SEQ ID NO: 65721 - DNA, 80 bp, synthetic construct; identical to SEQ ID NO: 11748
  source 1..80: mol_type = other DNA

SEQ ID NO: 65722 - DNA, 80 bp, synthetic construct; identical to SEQ ID NO: 31432
  source 1..80: mol_type = other DNA

SEQ ID NO: 65723 - DNA, 80 bp, synthetic construct; identical to SEQ ID NO: 31433
  source 1..80: mol_type = other DNA

SEQ ID NO: 65724 - DNA, 80 bp, synthetic construct; identical to SEQ ID NO: 31434
  source 1..80: mol_type = other DNA

SEQ ID NO: 65725 - DNA, 80 bp, synthetic construct; identical to SEQ ID NO: 11749
  source 1..80: mol_type = other DNA

SEQ ID NO: 65726 - DNA, 80 bp, synthetic construct; identical to SEQ ID NO: 31436
  source 1..80: mol_type = other DNA

SEQ ID NO: 65727 - DNA, 80 bp, synthetic construct; identical to SEQ ID NO: 31437
  source 1..80: mol_type = other DNA

SEQ ID NO: 65728 - DNA, 80 bp, synthetic construct; identical to SEQ ID NO: 31438
  source 1..80: mol_type = other DNA

SEQ ID NO: 65729 - DNA, 80 bp, synthetic construct; identical to SEQ ID NO: 11750
  source 1..80: mol_type = other DNA

SEQ ID NO: 65730 - DNA, 80 bp, synthetic construct; identical to SEQ ID NO: 31441
  source 1..80: mol_type = other DNA

SEQ ID NO: 65731 - DNA, 80 bp, synthetic construct; identical to SEQ ID NO: 11751
  source 1..80: mol_type = other DNA

SEQ ID NO: 65732 - DNA, 80 bp, synthetic construct; identical to SEQ ID NO: 31443
  source 1..80: mol_type = other DNA

SEQ ID NO: 65733 - DNA, 80 bp, synthetic construct; identical to SEQ ID NO: 31444
  source 1..80: mol_type = other DNA

SEQ ID NO: 65734 - DNA, 80 bp, synthetic construct; identical to SEQ ID NO: 31445
  source 1..80: mol_type = other DNA

SEQ ID NO: 65735 - DNA, 80 bp, synthetic construct; identical to SEQ ID NO: 31446
  source 1..80: mol_type = other DNA

SEQ ID NO: 65736 - DNA, 80 bp, synthetic construct; identical to SEQ ID NO: 11752
  source 1..80: mol_type = other DNA

SEQ ID NO: 65737 - DNA, 80 bp, synthetic construct; identical to SEQ ID NO: 31448
  source 1..80: mol_type = other DNA

SEQ ID NO: 65738 - DNA, 80 bp, synthetic construct; identical to SEQ ID NO: 31449
  source 1..80: mol_type = other DNA

SEQ ID NO: 65739 - DNA, 80 bp, synthetic construct; identical to SEQ ID NO: 31450
  source 1..80: mol_type = other DNA

SEQ ID NO: 65740 - DNA, 80 bp, synthetic construct; identical to SEQ ID NO: 11753
  source 1..80: mol_type = other DNA

SEQ ID NO: 65741 - DNA, 80 bp, synthetic construct; identical to SEQ ID NO: 31452
  source 1..80: mol_type = other DNA

SEQ ID NO: 65742 - DNA, 80 bp, synthetic construct; identical to SEQ ID NO: 11754
  source 1..80: mol_type = other DNA

SEQ ID NO: 65743 - DNA, 80 bp, synthetic construct; identical to SEQ ID NO: 31454
  source 1..80: mol_type = other DNA

SEQ ID NO: 65744 - DNA, 80 bp, synthetic construct; identical to SEQ ID NO: 31455
  source 1..80: mol_type = other DNA

SEQ ID NO: 65745 - DNA, 80 bp, synthetic construct; identical to SEQ ID NO: 31456
  source 1..80: mol_type = other DNA

SEQ ID NO: 65746 - DNA, 80 bp, synthetic construct; identical to SEQ ID NO: 11755
  source 1..80: mol_type = other DNA

SEQ ID NO: 65747 - DNA, 80 bp, synthetic construct; identical to SEQ ID NO: 31458
  source 1..80: mol_type = other DNA

SEQ ID NO: 65748 - DNA, 80 bp, synthetic construct; identical to SEQ ID NO: 31459
  source 1..80: mol_type = other DNA

SEQ ID NO: 65749 - DNA, 80 bp, synthetic construct; identical to SEQ ID NO: 31460
  source 1..80: mol_type = other DNA

SEQ ID NO: 65750 - DNA, 80 bp, synthetic construct; identical to SEQ ID NO: 11756
  source 1..80: mol_type = other DNA

SEQ ID NO: 65751 - DNA, 80 bp, synthetic construct; identical to SEQ ID NO: 31463
  source 1..80: mol_type = other DNA

SEQ ID NO: 65752 - DNA, 80 bp, synthetic construct; identical to SEQ ID NO: 11757
  source 1..80: mol_type = other DNA

SEQ ID NO: 65753 - DNA, 80 bp, synthetic construct; identical to SEQ ID NO: 31466
  source 1..80: mol_type = other DNA

SEQ ID NO: 65754 - DNA, 80 bp, synthetic construct; identical to SEQ ID NO: 31468
  source 1..80: mol_type = other DNA

SEQ ID NO: 65755 - DNA, 80 bp, synthetic construct; identical to SEQ ID NO: 11758
  source 1..80: mol_type = other DNA

SEQ ID NO: 65756 - DNA, 80 bp, synthetic construct; identical to SEQ ID NO: 31471
  source 1..80: mol_type = other DNA

SEQ ID NO: 65757 - DNA, 80 bp, synthetic construct; identical to SEQ ID NO: 11759
  source 1..80: mol_type = other DNA

SEQ ID NO: 65758 - DNA, 80 bp, synthetic construct; identical to SEQ ID NO: 31475
  source 1..80: mol_type = other DNA

SEQ ID NO: 65759 - DNA, 80 bp, synthetic construct; identical to SEQ ID NO: 31477
  source 1..80: mol_type = other DNA

SEQ ID NO: 65760 - DNA, 80 bp, synthetic construct; identical to SEQ ID NO: 31479
  source 1..80: mol_type = other DNA

SEQ ID NO: 65761 - DNA, 80 bp, synthetic construct; identical to SEQ ID NO: 31481
  source 1..80: mol_type = other DNA

SEQ ID NO: 65762 - DNA, 80 bp, synthetic construct; identical to SEQ ID NO: 11761
  source 1..80: mol_type = other DNA

SEQ ID NO: 65763 - DNA, 80 bp, synthetic construct; identical to SEQ ID NO: 31484
  source 1..80: mol_type = other DNA

SEQ ID NO: 65764 - DNA, 80 bp, synthetic construct; identical to SEQ ID NO: 31485
  source 1..80: mol_type = other DNA

SEQ ID NO: 65765 - DNA, 80 bp, synthetic construct; identical to SEQ ID NO: 11762
  source 1..80: mol_type = other DNA

SEQ ID NO: 65766 - DNA, 80 bp, synthetic construct; identical to SEQ ID NO: 31487
  source 1..80: mol_type = other DNA

SEQ ID NO: 65767 - DNA, 80 bp, synthetic construct; identical to SEQ ID NO: 31488
  source 1..80: mol_type = other DNA

SEQ ID NO: 65768 - DNA, 80 bp, synthetic construct; identical to SEQ ID NO: 31489
  source 1..80: mol_type = other DNA

SEQ ID NO: 65769 - DNA, 80 bp, synthetic construct; identical to SEQ ID NO: 31490
  source 1..80: mol_type = other DNA

SEQ ID NO: 65770 - DNA, 80 bp, synthetic construct; identical to SEQ ID NO: 31491
  source 1..80: mol_type = other DNA

SEQ ID NO: 65771 - DNA, 80 bp, synthetic construct; identical to SEQ ID NO: 31492
  source 1..80: mol_type = other DNA

SEQ ID NO: 65772 - DNA, 80 bp, synthetic construct; identical to SEQ ID NO: 31493
  source 1..80: mol_type = other DNA

SEQ ID NO: 65773 - DNA, 80 bp, synthetic construct; identical to SEQ ID NO: 31494
  source 1..80: mol_type = other DNA

SEQ ID NO: 65774 - DNA, 80 bp, synthetic construct; identical to SEQ ID NO: 11763
  source 1..80: mol_type = other DNA

SEQ ID NO: 65775 - DNA, 80 bp, synthetic construct; identical to SEQ ID NO: 31496
  source 1..80: mol_type = other DNA

SEQ ID NO: 65776 - DNA, 80 bp, synthetic construct; identical to SEQ ID NO: 31497
  source 1..80: mol_type = other DNA

SEQ ID NO: 65777 - DNA, 80 bp, synthetic construct; identical to SEQ ID NO: 31498
  source 1..80: mol_type = other DNA

SEQ ID NO: 65778 - DNA, 80 bp, synthetic construct; identical to SEQ ID NO: 31499
  source 1..80: mol_type = other DNA

SEQ ID NO: 65779 - DNA, 80 bp, synthetic construct; identical to SEQ ID NO: 11764
  source 1..80: mol_type = other DNA

SEQ ID NO: 65780 - DNA, 80 bp, synthetic construct; identical to SEQ ID NO: 31501
  source 1..80: mol_type = other DNA

SEQ ID NO: 65781 - DNA, 80 bp, synthetic construct; identical to SEQ ID NO: 31502
  source 1..80: mol_type = other DNA

SEQ ID NO: 65782 - DNA, 80 bp, synthetic construct; identical to SEQ ID NO: 31503
  source 1..80: mol_type = other DNA

SEQ ID NO: 65783 - DNA, 80 bp, synthetic construct; identical to SEQ ID NO: 11765
  source 1..80: mol_type = other DNA

SEQ ID NO: 65784 - DNA, 80 bp, synthetic construct; identical to SEQ ID NO: 31506
  source 1..80: mol_type = other DNA

SEQ ID NO: 65785 - DNA, 80 bp, synthetic construct; identical to SEQ ID NO: 11766
  source 1..80: mol_type = other DNA

SEQ ID NO: 65786 - DNA, 80 bp, synthetic construct; identical to SEQ ID NO: 31508
  source 1..80: mol_type = other DNA

SEQ ID NO: 65787 - DNA, 80 bp, synthetic construct; identical to SEQ ID NO: 31509
  source 1..80: mol_type = other DNA

SEQ ID NO: 65788 - DNA, 80 bp, synthetic construct; identical to SEQ ID NO: 31510
  source 1..80: mol_type = other DNA

SEQ ID NO: 65789 - DNA, 80 bp, synthetic construct; identical to SEQ ID NO: 31512
  source 1..80: mol_type = other DNA

SEQ ID NO: 65790 - DNA, 80 bp, synthetic construct; identical to SEQ ID NO: 11768
  source 1..80: mol_type = other DNA

SEQ ID NO: 65791 - DNA, 80 bp, synthetic construct; identical to SEQ ID NO: 31515
  source 1..80: mol_type = other DNA

SEQ ID NO: 65792 - DNA, 80 bp, synthetic construct; identical to SEQ ID NO: 31516
  source 1..80: mol_type = other DNA

SEQ ID NO: 65793 - DNA, 80 bp, synthetic construct; identical to SEQ ID NO: 11769
  source 1..80: mol_type = other DNA

SEQ ID NO: 65794 - DNA, 80 bp, synthetic construct; identical to SEQ ID NO: 31518
  source 1..80: mol_type = other DNA

SEQ ID NO: 65795 - DNA, 80 bp, synthetic construct; identical to SEQ ID NO: 31519
  source 1..80: mol_type = other DNA

SEQ ID NO: 65796 - DNA, 80 bp, synthetic construct; identical to SEQ ID NO: 31521
  source 1..80: mol_type = other DNA

SEQ ID NO: 65797 - DNA, 80 bp, synthetic construct; identical to SEQ ID NO: 31522
  source 1..80: mol_type = other DNA

SEQ ID NO: 65798 - DNA, 80 bp, synthetic construct; identical to SEQ ID NO: 31523
  source 1..80: mol_type = other DNA

SEQ ID NO: 65799 - DNA, 80 bp, synthetic construct; identical to SEQ ID NO: 11650
  source 1..80: mol_type = other DNA

SEQ ID NO: 65800 - DNA, 80 bp, synthetic construct; identical to SEQ ID NO: 31525
  source 1..80: mol_type = other DNA

SEQ ID NO: 65801 - DNA, 80 bp, synthetic construct; identical to SEQ ID NO: 31526
  source 1..80: mol_type = other DNA

SEQ ID NO: 65802 - DNA, 80 bp, synthetic construct; identical to SEQ ID NO: 31527
  source 1..80: mol_type = other DNA

SEQ ID NO: 65803 - DNA, 80 bp, synthetic construct; identical to SEQ ID NO: 31528
  source 1..80: mol_type = other DNA

SEQ ID NO: 65804 - DNA, 80 bp, synthetic construct; identical to SEQ ID NO: 31529
  source 1..80: mol_type = other DNA

SEQ ID NO: 65805 - DNA, 80 bp, synthetic construct; identical to SEQ ID NO: 11772
  source 1..80: mol_type = other DNA

SEQ ID NO: 65806 - DNA, 80 bp, synthetic construct; identical to SEQ ID NO: 31531
  source 1..80: mol_type = other DNA

SEQ ID NO: 65807 - DNA, 80 bp, synthetic construct; identical to SEQ ID NO: 31532
  source 1..80: mol_type = other DNA

SEQ ID NO: 65808 - DNA, 80 bp, synthetic construct; identical to SEQ ID NO: 11773
  source 1..80: mol_type = other DNA

SEQ ID NO: 65809 - DNA, 80 bp, synthetic construct; identical to SEQ ID NO: 31535
  source 1..80: mol_type = other DNA

SEQ ID NO: 65810 - DNA, 80 bp, synthetic construct; identical to SEQ ID NO: 31536
  source 1..80: mol_type = other DNA

SEQ ID NO: 65811 - DNA, 80 bp, synthetic construct; identical to SEQ ID NO: 11774
  source 1..80: mol_type = other DNA

SEQ ID NO: 65812 - DNA, 80 bp, synthetic construct; identical to SEQ ID NO: 31539
  source 1..80: mol_type = other DNA

SEQ ID NO: 65813 - DNA, 80 bp, synthetic construct; identical to SEQ ID NO: 31541
  source 1..80: mol_type = other DNA

SEQ ID NO: 65814 - DNA, 80 bp, synthetic construct; identical to SEQ ID NO: 11775
  source 1..80: mol_type = other DNA

SEQ ID NO: 65815 - DNA, 80 bp, synthetic construct; identical to SEQ ID NO: 31543
  source 1..80: mol_type = other DNA

SEQ ID NO: 65816 - DNA, 80 bp, synthetic construct; identical to SEQ ID NO: 31544
  source 1..80: mol_type = other DNA

SEQ ID NO: 65817 - DNA, 80 bp, synthetic construct; identical to SEQ ID NO: 31545
  source 1..80: mol_type = other DNA

SEQ ID NO: 65818 - DNA, 80 bp, synthetic construct; identical to SEQ ID NO: 31546
  source 1..80: mol_type = other DNA

SEQ ID NO: 65819 - DNA, 80 bp, synthetic construct; identical to SEQ ID NO: 11776
  source 1..80: mol_type = other DNA

SEQ ID NO: 65820 - DNA, 80 bp, synthetic construct; identical to SEQ ID NO: 31548
  source 1..80: mol_type = other DNA

SEQ ID NO: 65821 - DNA, 80 bp, synthetic construct; identical to SEQ ID NO: 31549
  source 1..80: mol_type = other DNA

SEQ ID NO: 65822 - DNA, 80 bp, synthetic construct; identical to SEQ ID NO: 31550
  source 1..80: mol_type = other DNA

SEQ ID NO: 65823 - DNA, 80 bp, synthetic construct; identical to SEQ ID NO: 11777
  source 1..80: mol_type = other DNA

SEQ ID NO: 65824 - DNA, 80 bp, synthetic construct; identical to SEQ ID NO: 31552
  source 1..80: mol_type = other DNA

SEQ ID NO: 65825 - DNA, 80 bp, synthetic construct; identical to SEQ ID NO: 31553
  source 1..80: mol_type = other DNA

SEQ ID NO: 65826 - DNA, 80 bp, synthetic construct; identical to SEQ ID NO: 11778
  source 1..80: mol_type = other DNA

SEQ ID NO: 65827 - DNA, 80 bp, synthetic construct; identical to SEQ ID NO: 31556
  source 1..80: mol_type = other DNA

SEQ ID NO: 65828 - DNA, 80 bp, synthetic construct; identical to SEQ ID NO: 31558
  source 1..80: mol_type = other DNA

SEQ ID NO: 65829 - DNA, 80 bp, synthetic construct; identical to SEQ ID NO: 11779
  source 1..80: mol_type = other DNA

SEQ ID NO: 65830 - DNA, 80 bp, synthetic construct; identical to SEQ ID NO: 31560
  source 1..80: mol_type = other DNA

SEQ ID NO: 65831 - DNA, 80 bp, synthetic construct; identical to SEQ ID NO: 31561
  source 1..80: mol_type = other DNA

SEQ ID NO: 65832 - DNA, 80 bp, synthetic construct; identical to SEQ ID NO: 31563
  source 1..80: mol_type = other DNA

SEQ ID NO: 65833 - DNA, 80 bp, synthetic construct; identical to SEQ ID NO: 11780
  source 1..80: mol_type = other DNA

SEQ ID NO: 65834 - DNA, 80 bp, synthetic construct; identical to SEQ ID NO: 31565
  source 1..80: mol_type = other DNA

SEQ ID NO: 65835 - DNA, 80 bp, synthetic construct; identical to SEQ ID NO: 31566
  source 1..80: mol_type = other DNA

SEQ ID NO: 65836 - DNA, 80 bp, synthetic construct; identical to SEQ ID NO: 11781
  source 1..80: mol_type = other DNA

SEQ ID NO: 65837 - DNA, 80 bp, synthetic construct; identical to SEQ ID NO: 31568
  source 1..80: mol_type = other DNA

SEQ ID NO: 65838 - DNA, 80 bp, synthetic construct; identical to SEQ ID NO: 31569
  source 1..80: mol_type = other DNA

SEQ ID NO: 65839 - DNA, 80 bp, synthetic construct; identical to SEQ ID NO: 31571
  source 1..80: mol_type = other DNA

SEQ ID NO: 65840 - DNA, 80 bp, synthetic construct; identical to SEQ ID NO: 11782
  source 1..80: mol_type = other DNA

SEQ ID NO: 65841 - DNA, 80 bp, synthetic construct; identical to SEQ ID NO: 31573
  source 1..80: mol_type = other DNA

SEQ ID NO: 65842 - DNA, 80 bp, synthetic construct; identical to SEQ ID NO: 31574
  source 1..80: mol_type = other DNA

SEQ ID NO: 65843 - DNA, 80 bp, synthetic construct; identical to SEQ ID NO: 11783
  source 1..80: mol_type = other DNA

SEQ ID NO: 65844 - DNA, 80 bp, synthetic construct; identical to SEQ ID NO: 31576
  source 1..80: mol_type = other DNA

SEQ ID NO: 65845 - DNA, 80 bp, synthetic construct; identical to SEQ ID NO: 31577
  source 1..80: mol_type = other DNA

SEQ ID NO: 65846 - DNA, 80 bp, synthetic construct; identical to SEQ ID NO: 31578
  source 1..80: mol_type = other DNA

SEQ ID NO: 65847 - DNA, 80 bp, synthetic construct; identical to SEQ ID NO: 31580
  source 1..80: mol_type = other DNA

SEQ ID NO: 65848 - DNA, 80 bp, synthetic construct; identical to SEQ ID NO: 31582
  source 1..80: mol_type = other DNA

SEQ ID NO: 65849 - DNA, 80 bp, synthetic construct; identical to SEQ ID NO: 11785
  source 1..80: mol_type = other DNA

SEQ ID NO: 65850 - DNA, 80 bp, synthetic construct; identical to SEQ ID NO: 31586
  source 1..80: mol_type = other DNA

SEQ ID NO: 65851 - DNA, 80 bp, synthetic construct; identical to SEQ ID NO: 11786
  source 1..80: mol_type = other DNA

SEQ ID NO: 65852 - DNA, 80 bp, synthetic construct; identical to SEQ ID NO: 31590
  source 1..80: mol_type = other DNA

SEQ ID NO: 65853 - DNA, 80 bp, synthetic construct; identical to SEQ ID NO: 31592
  source 1..80: mol_type = other DNA

SEQ ID NO: 65854 - DNA, 80 bp, synthetic construct; identical to SEQ ID NO: 31594
  source 1..80: mol_type = other DNA

SEQ ID NO: 65855 - DNA, 80 bp, synthetic construct; identical to SEQ ID NO: 11788
  source 1..80: mol_type = other DNA

SEQ ID NO: 65856 - DNA, 80 bp, synthetic construct; identical to SEQ ID NO: 31597
  source 1..80: mol_type = other DNA

SEQ ID NO: 65857 - DNA, 80 bp, synthetic construct; identical to SEQ ID NO: 31599
  source 1..80: mol_type = other DNA

SEQ ID NO: 65858 - DNA, 80 bp, synthetic construct; identical to SEQ ID NO: 11789
  source 1..80: mol_type = other DNA

SEQ ID NO: 65859 - DNA, 80 bp, synthetic construct; identical to SEQ ID NO: 31601
  source 1..80: mol_type = other DNA

SEQ ID NO: 65860 - DNA, 80 bp, synthetic construct; identical to SEQ ID NO: 31602
  source 1..80: mol_type = other DNA

SEQ ID NO: 65861 - DNA, 80 bp, synthetic construct; identical to SEQ ID NO: 31603
  source 1..80: mol_type = other DNA

SEQ ID NO: 65862 - DNA, 80 bp, synthetic construct; identical to SEQ ID NO: 11790
  source 1..80: mol_type = other DNA

SEQ ID NO: 65863 - DNA, 80 bp, synthetic construct; identical to SEQ ID NO: 31605
  source 1..80: mol_type = other DNA

SEQ ID NO: 65864 - DNA, 80 bp, synthetic construct; identical to SEQ ID NO: 31607
  source 1..80: mol_type = other DNA

SEQ ID NO: 65865 - DNA, 80 bp, synthetic construct; identical to SEQ ID NO: 11791
  source 1..80: mol_type = other DNA

SEQ ID NO: 65866 - DNA, 80 bp, synthetic construct; identical to SEQ ID NO: 31609
  source 1..80: mol_type = other DNA

SEQ ID NO: 65867 - DNA, 80 bp, synthetic construct; identical to SEQ ID NO: 31610
  source 1..80: mol_type = other DNA

SEQ ID NO: 65868 - DNA, 80 bp, synthetic construct; identical to SEQ ID NO: 31611
  source 1..80: mol_type = other DNA

SEQ ID NO: 65869 - DNA, 80 bp, synthetic construct; identical to SEQ ID NO: 11792
  source 1..80: mol_type = other DNA

SEQ ID NO: 65870 - DNA, 80 bp, synthetic construct; identical to SEQ ID NO: 31613
  source 1..80: mol_type = other DNA

SEQ ID NO: 65871 - DNA, 80 bp, synthetic construct; identical to SEQ ID NO: 31614
  source 1..80: mol_type = other DNA

SEQ ID NO: 65872 - DNA, 80 bp, synthetic construct; identical to SEQ ID NO: 31615
  source 1..80: mol_type = other DNA

SEQ ID NO: 65873 - DNA, 80 bp, synthetic construct; identical to SEQ ID NO: 31616
  source 1..80: mol_type = other DNA

SEQ ID NO: 65874 - DNA, 80 bp, synthetic construct; identical to SEQ ID NO: 11793
  source 1..80: mol_type = other DNA

SEQ ID NO: 65875 - DNA, 80 bp, synthetic construct; identical to SEQ ID NO: 31618
  source 1..80: mol_type = other DNA

SEQ ID NO: 65876 - DNA, 80 bp, synthetic construct; identical to SEQ ID NO: 31619
  source 1..80: mol_type = other DNA

SEQ ID NO: 65877 - DNA, 80 bp, synthetic construct; identical to SEQ ID NO: 31620
  source 1..80: mol_type = other DNA

SEQ ID NO: 65878 - DNA, 80 bp, synthetic construct; identical to SEQ ID NO: 11794
  source 1..80: mol_type = other DNA

SEQ ID NO: 65879 - DNA, 80 bp, synthetic construct; identical to SEQ ID NO: 31622
  source 1..80: mol_type = other DNA

SEQ ID NO: 65880 - DNA, 80 bp, synthetic construct; identical to SEQ ID NO: 31623
  source 1..80: mol_type = other DNA

SEQ ID NO: 65881 - DNA, 80 bp, synthetic construct; identical to SEQ ID NO: 31624
  source 1..80: mol_type = other DNA

SEQ ID NO: 65882 - DNA, 80 bp, synthetic construct; identical to SEQ ID NO: 31626
  source 1..80: mol_type = other DNA

SEQ ID NO: 65883 - DNA, 80 bp, synthetic construct; identical to SEQ ID NO: 11687
  source 1..80: mol_type = other DNA

SEQ ID NO: 65884 - DNA, 80 bp, synthetic construct; identical to SEQ ID NO: 11796
  source 1..80: mol_type = other DNA

SEQ ID NO: 65885 - DNA, 80 bp, synthetic construct; identical to SEQ ID NO: 31629
  source 1..80: mol_type = other DNA

SEQ ID NO: 65886 - DNA, 80 bp, synthetic construct; identical to SEQ ID NO: 31630
  source 1..80: mol_type = other DNA

SEQ ID NO: 65887 - DNA, 80 bp, synthetic construct; identical to SEQ ID NO: 31632
  source 1..80: mol_type = other DNA

SEQ ID NO: 65888 - DNA, 80 bp, synthetic construct; identical to SEQ ID NO: 31633
  source 1..80: mol_type = other DNA

SEQ ID NO: 65889 - DNA, 80 bp, synthetic construct; identical to SEQ ID NO: 31635
  source 1..80: mol_type = other DNA

SEQ ID NO: 65890 - DNA, 80 bp, synthetic construct; identical to SEQ ID NO: 31637
  source 1..80: mol_type = other DNA

SEQ ID NO: 65891 - DNA, 80 bp, synthetic construct; identical to SEQ ID NO: 31638
  source 1..80: mol_type = other DNA

SEQ ID NO: 65892 - DNA, 80 bp, synthetic construct; identical to SEQ ID NO: 31639
  source 1..80: mol_type = other DNA

SEQ ID NO: 65893 - DNA, 80 bp, synthetic construct; identical to SEQ ID NO: 11799
  source 1..80: mol_type = other DNA

SEQ ID NO: 65894 - DNA, 80 bp, synthetic construct; identical to SEQ ID NO: 31641
  source 1..80: mol_type = other DNA

SEQ ID NO: 65895 - DNA, 80 bp, synthetic construct; identical to SEQ ID NO: 31642
  source 1..80: mol_type = other DNA

SEQ ID NO: 65896 - DNA, 80 bp, synthetic construct; identical to SEQ ID NO: 31643
  source 1..80: mol_type = other DNA

SEQ ID NO: 65897 - DNA, 80 bp, synthetic construct; identical to SEQ ID NO: 11800
  source 1..80: mol_type = other DNA

SEQ ID NO: 65898 - DNA, 80 bp, synthetic construct; identical to SEQ ID NO: 11691
  source 1..80: mol_type = other DNA

SEQ ID NO: 65899 - DNA, 80 bp, synthetic construct; identical to SEQ ID NO: 31646
  source 1..80: mol_type = other DNA

SEQ ID NO: 65900 - DNA, 80 bp, synthetic construct; identical to SEQ ID NO: 31647
  source 1..80: mol_type = other DNA

SEQ ID NO: 65901 - DNA, 80 bp, synthetic construct; identical to SEQ ID NO: 31648
  source 1..80: mol_type = other DNA

SEQ ID NO: 65902 - DNA, 80 bp, synthetic construct; identical to SEQ ID NO: 11801
  source 1..80: mol_type = other DNA

SEQ ID NO: 65903 - DNA, 80 bp, synthetic construct; identical to SEQ ID NO: 31650
  source 1..80: mol_type = other DNA

SEQ ID NO: 65904 - DNA, 80 bp, synthetic construct; identical to SEQ ID NO: 31651
  source 1..80: mol_type = other DNA

SEQ ID NO: 65905 - DNA, 80 bp, synthetic construct; identical to SEQ ID NO: 11802
  source 1..80: mol_type = other DNA

SEQ ID NO: 65906 - DNA, 80 bp, synthetic construct; identical to SEQ ID NO: 31653
  source 1..80: mol_type = other DNA

SEQ ID NO: 65907 - DNA, 80 bp, synthetic construct; identical to SEQ ID NO: 31654
  source 1..80: mol_type = other DNA

SEQ ID NO: 65908 - DNA, 80 bp, synthetic construct; identical to SEQ ID NO: 31655
  source 1..80: mol_type = other DNA

SEQ ID NO: 65909 - DNA, 80 bp, synthetic construct; identical to SEQ ID NO: 31656
  source 1..80: mol_type = other DNA

SEQ ID NO: 65910 - DNA, 80 bp, synthetic construct; identical to SEQ ID NO: 11803
  source 1..80: mol_type = other DNA

SEQ ID NO: 65911 - DNA, 80 bp, synthetic construct; identical to SEQ ID NO: 31658
  source 1..80: mol_type = other DNA

SEQ ID NO: 65912 - DNA, 80 bp, synthetic construct; identical to SEQ ID NO: 31659
  source 1..80: mol_type = other DNA

SEQ ID NO: 65913 - DNA, 80 bp, synthetic construct; identical to SEQ ID NO: 11804
  source 1..80: mol_type = other DNA

SEQ ID NO: 65914 - DNA, 80 bp, synthetic construct; identical to SEQ ID NO: 31661
  source 1..80: mol_type = other DNA

SEQ ID NO: 65915 - DNA, 80 bp, synthetic construct; identical to SEQ ID NO: 31662
  source 1..80: mol_type = other DNA

SEQ ID NO: 65916 - DNA, 80 bp, synthetic construct; identical to SEQ ID NO: 31663
  source 1..80: mol_type = other DNA

SEQ ID NO: 65917 - DNA, 80 bp, synthetic construct; identical to SEQ ID NO: 11805
  source 1..80: mol_type = other DNA

SEQ ID NO: 65918 - DNA, 80 bp, synthetic construct; identical to SEQ ID NO: 31665
  source 1..80: mol_type = other DNA

SEQ ID NO: 65919 - DNA, 80 bp, synthetic construct; identical to SEQ ID NO: 31666
  source 1..80: mol_type = other DNA

SEQ ID NO: 65920 - DNA, 80 bp, synthetic construct; identical to SEQ ID NO: 11700
  source 1..80: mol_type = other DNA

SEQ ID NO: 65921 - DNA, 80 bp, synthetic construct; identical to SEQ ID NO: 31668
  source 1..80: mol_type = other DNA

SEQ ID NO: 65922 - DNA, 80 bp, synthetic construct; identical to SEQ ID NO: 31669
  source 1..80: mol_type = other DNA

SEQ ID NO: 65923 - DNA, 80 bp, synthetic construct; identical to SEQ ID NO: 31670
  source 1..80: mol_type = other DNA

SEQ ID NO: 65924 - DNA, 80 bp, synthetic construct; identical to SEQ ID NO: 11807
  source 1..80: mol_type = other DNA

SEQ ID NO: 65925 - DNA, 80 bp, synthetic construct; identical to SEQ ID NO: 31672
  source 1..80: mol_type = other DNA

SEQ ID NO: 65926 - DNA, 80 bp, synthetic construct; identical to SEQ ID NO: 31673
  source 1..80: mol_type = other DNA

SEQ ID NO: 65927 - DNA, 80 bp, synthetic construct; identical to SEQ ID NO: 31674
  source 1..80: mol_type = other DNA

SEQ ID NO: 65928 - DNA, 80 bp, synthetic construct; identical to SEQ ID NO: 11808
  source 1..80: mol_type = other DNA

SEQ ID NO: 65929 - DNA, 80 bp, synthetic construct; identical to SEQ ID NO: 31676
  source 1..80: mol_type = other DNA

SEQ ID NO: 65930 - DNA, 80 bp, synthetic construct; identical to SEQ ID NO: 31677
  source 1..80: mol_type = other DNA

SEQ ID NO: 65931 - DNA, 80 bp, synthetic construct; identical to SEQ ID NO: 31678
  source 1..80: mol_type = other DNA

SEQ ID NO: 65932 - DNA, 80 bp, synthetic construct; identical to SEQ ID NO: 31679
  source 1..80: mol_type = other DNA

SEQ ID NO: 65933 - DNA, 80 bp, synthetic construct; identical to SEQ ID NO: 31680
  source 1..80: mol_type = other DNA

SEQ ID NO: 65934 - DNA, 80 bp, synthetic construct; identical to SEQ ID NO: 31681
  source 1..80: mol_type = other DNA

SEQ ID NO: 65935 - DNA, 80 bp, synthetic construct; identical to SEQ ID NO: 31682
  source 1..80: mol_type = other DNA

SEQ ID NO: 65936 - DNA, 80 bp, synthetic construct; identical to SEQ ID NO: 31683
  source 1..80: mol_type = other DNA

SEQ ID NO: 65937 - DNA, 80 bp, synthetic construct; identical to SEQ ID NO: 11810
  source 1..80: mol_type = other DNA

SEQ ID NO: 65938 - DNA, 80 bp, synthetic construct; identical to SEQ ID NO: 31685
  source 1..80: mol_type = other DNA

SEQ ID NO: 65939 - DNA, 80 bp, synthetic construct; identical to SEQ ID NO: 31686
  source 1..80: mol_type = other DNA

SEQ ID NO: 65940 - DNA, 80 bp, synthetic construct; identical to SEQ ID NO: 31687
  source 1..80: mol_type = other DNA

SEQ ID NO: 65941 - DNA, 80 bp, synthetic construct; identical to SEQ ID NO: 11811
  source 1..80: mol_type = other DNA

SEQ ID NO: 65942 - DNA, 80 bp, synthetic construct; identical to SEQ ID NO: 31689
  source 1..80: mol_type = other DNA

SEQ ID NO: 65943 - DNA, 80 bp, synthetic construct; identical to SEQ ID NO: 31690
  source 1..80: mol_type = other DNA

SEQ ID NO: 65944 - DNA, 80 bp, synthetic construct; identical to SEQ ID NO: 31691
  source 1..80: mol_type = other DNA

SEQ ID NO: 65945 - DNA, 80 bp, synthetic construct; identical to SEQ ID NO: 11812
  source 1..80: mol_type = other DNA

SEQ ID NO: 65946 - DNA, 80 bp, synthetic construct; identical to SEQ ID NO: 31693
  source 1..80: mol_type = other DNA

SEQ ID NO: 65947 - DNA, 80 bp, synthetic construct; identical to SEQ ID NO: 31694
  source 1..80: mol_type = other DNA

SEQ ID NO: 65948 - DNA, 80 bp, synthetic construct; identical to SEQ ID NO: 31695
  source 1..80: mol_type = other DNA

SEQ ID NO: 65949 - DNA, 80 bp, synthetic construct; identical to SEQ ID NO: 11813
  source 1..80: mol_type = other DNA

SEQ ID NO: 65950 - DNA, 80 bp, synthetic construct; identical to SEQ ID NO: 31697
  source 1..80: mol_type = other DNA

SEQ ID NO: 65951 - DNA, 80 bp, synthetic construct; identical to SEQ ID NO: 11720
  source 1..80: mol_type = other DNA

SEQ ID NO: 65952 - DNA, 80 bp, synthetic construct; identical to SEQ ID NO: 31699
  source 1..80: mol_type = other DNA

SEQ ID NO: 65953 - DNA, 80 bp, synthetic construct; identical to SEQ ID NO: 11814
  source 1..80: mol_type = other DNA

SEQ ID NO: 65954 - DNA, 80 bp, synthetic construct; identical to SEQ ID NO: 31701
  source 1..80: mol_type = other DNA

SEQ ID NO: 65955 - DNA, 80 bp, synthetic construct; identical to SEQ ID NO: 31702
  source 1..80: mol_type = other DNA

SEQ ID NO: 65956 - DNA, 80 bp, synthetic construct; identical to SEQ ID NO: 31703
  source 1..80: mol_type = other DNA

SEQ ID NO: 65957 - DNA, 80 bp, synthetic construct; identical to SEQ ID NO: 11815
  source 1..80: mol_type = other DNA

SEQ ID NO: 65958 - DNA, 80 bp, synthetic construct; identical to SEQ ID NO: 31705
  source 1..80: mol_type = other DNA

SEQ ID NO: 65959 - DNA, 80 bp, synthetic construct; identical to SEQ ID NO: 31706
  source 1..80: mol_type = other DNA

SEQ ID NO: 65960 - DNA, 80 bp, synthetic construct; identical to SEQ ID NO: 31707
  source 1..80: mol_type = other DNA

SEQ ID NO: 65961 - DNA, 80 bp, synthetic construct; identical to SEQ ID NO: 11816
  source 1..80: mol_type = other DNA

SEQ ID NO: 65962 - DNA, 80 bp, synthetic construct; identical to SEQ ID NO: 31709
  source 1..80: mol_type = other DNA

SEQ ID NO: 65963 - DNA, 80 bp, synthetic construct; identical to SEQ ID NO: 31710
  source 1..80: mol_type = other DNA

SEQ ID NO: 65964 - DNA, 80 bp, synthetic construct; identical to SEQ ID NO: 31711
  source 1..80: mol_type = other DNA

SEQ ID NO: 65965 - DNA, 80 bp, synthetic construct; identical to SEQ ID NO: 31712
  source 1..80: mol_type = other DNA

SEQ ID NO: 65966 - DNA, 80 bp, synthetic construct; identical to SEQ ID NO: 31713
  source 1..80: mol_type = other DNA

SEQ ID NO: 65967 - DNA, 80 bp, synthetic construct; identical to SEQ ID NO: 11817
  source 1..80: mol_type = other DNA

SEQ ID NO: 65968 - DNA, 80 bp, synthetic construct; identical to SEQ ID NO: 31715
  source 1..80: mol_type = other DNA

SEQ ID NO: 65969 - DNA, 80 bp, synthetic construct; identical to SEQ ID NO: 31716
  source 1..80: mol_type = other DNA

SEQ ID NO: 65970 - DNA, 80 bp, synthetic construct; identical to SEQ ID NO: 31717
  source 1..80: mol_type = other DNA

SEQ ID NO: 65971 - DNA, 80 bp, synthetic construct; identical to SEQ ID NO: 11818
  source 1..80: mol_type = other DNA

SEQ ID NO: 65972 - DNA, 80 bp, synthetic construct; identical to SEQ ID NO: 31719
  source 1..80: mol_type = other DNA

SEQ ID NO: 65973 - DNA, 80 bp, synthetic construct; identical to SEQ ID NO: 31720
  source 1..80: mol_type = other DNA

SEQ ID NO: 65974 - DNA, 80 bp, synthetic construct; identical to SEQ ID NO: 31721
  source 1..80: mol_type = other DNA

SEQ ID NO: 65975 - DNA, 80 bp, synthetic construct; identical to SEQ ID NO: 11819
  source 1..80: mol_type = other DNA

SEQ ID NO: 65976 - DNA, 80 bp, synthetic construct; identical to SEQ ID NO: 31723
  source 1..80: mol_type = other DNA

SEQ ID NO: 65977 - DNA, 80 bp, synthetic construct; identical to SEQ ID NO: 31724
  source 1..80: mol_type = other DNA

SEQ ID NO: 65978 - DNA, 80 bp, synthetic construct; identical to SEQ ID NO: 31725
  source 1..80: mol_type = other DNA

SEQ ID NO: 65979 - DNA, 80 bp, synthetic construct; identical to SEQ ID NO: 11820
  source 1..80: mol_type = other DNA

SEQ ID NO: 65980 - DNA, 80 bp, synthetic construct; identical to SEQ ID NO: 31727
  source 1..80: mol_type = other DNA

SEQ ID NO: 65981 - DNA, 80 bp, synthetic construct; identical to SEQ ID NO: 31728
  source 1..80: mol_type = other DNA

SEQ ID NO: 65982 - DNA, 80 bp, synthetic construct; identical to SEQ ID NO: 31730
  source 1..80: mol_type = other DNA

SEQ ID NO: 65983 - DNA, 80 bp, synthetic construct; identical to SEQ ID NO: 11822
  source 1..80: mol_type = other DNA

SEQ ID NO: 65984 - DNA, 80 bp, synthetic construct; identical to SEQ ID NO: 31732
  source 1..80: mol_type = other DNA

SEQ ID NO: 65985 - DNA, 80 bp, synthetic construct; identical to SEQ ID NO: 31733
  source 1..80: mol_type = other DNA

SEQ ID NO: 65986 - DNA, 80 bp, synthetic construct; identical to SEQ ID NO: 31734
  source 1..80: mol_type = other DNA

SEQ ID NO: 65987 - DNA, 80 bp, synthetic construct; identical to SEQ ID NO: 11823
  source 1..80: mol_type = other DNA

SEQ ID NO: 65988 - DNA, 80 bp, synthetic construct; identical to SEQ ID NO: 31736
  source 1..80: mol_type = other DNA

SEQ ID NO: 65989 - DNA, 80 bp, synthetic construct; identical to SEQ ID NO: 31737
  source 1..80: mol_type = other DNA

SEQ ID NO: 65990 - DNA, 80 bp, synthetic construct; identical to SEQ ID NO: 31738
  source 1..80: mol_type = other DNA

SEQ ID NO: 65991 - DNA, 80 bp, synthetic construct; identical to SEQ ID NO: 11824
  source 1..80: mol_type = other DNA

SEQ ID NO: 65992 - DNA, 80 bp, synthetic construct; identical to SEQ ID NO: 31740
  source 1..80: mol_type = other DNA

SEQ ID NO: 65993 - DNA, 80 bp, synthetic construct; identical to SEQ ID NO: 31741
  source 1..80: mol_type = other DNA

SEQ ID NO: 65994 - DNA, 80 bp, synthetic construct; identical to SEQ ID NO: 31742
  source 1..80: mol_type = other DNA

SEQ ID NO: 65995 - DNA, 80 bp, synthetic construct; identical to SEQ ID NO: 11825
  source 1..80: mol_type = other DNA

SEQ ID NO: 65996 - DNA, 80 bp, synthetic construct; identical to SEQ ID NO: 31744
  source 1..80: mol_type = other DNA

SEQ ID NO: 65997 - DNA, 80 bp, synthetic construct; identical to SEQ ID NO: 31745
  source 1..80: mol_type = other DNA

SEQ ID NO: 65998 - DNA, 80 bp, synthetic construct; identical to SEQ ID NO: 31746
  source 1..80: mol_type = other DNA

SEQ ID NO: 65999 - DNA, 80 bp, synthetic construct; identical to SEQ ID NO: 11826
  source 1..80: mol_type = other DNA

SEQ ID NO: 66000 - DNA, 80 bp, synthetic construct; identical to SEQ ID NO: 31748
  source 1..80: mol_type = other DNA

SEQ ID NO: 66001 - DNA, 80 bp, synthetic construct; identical to SEQ ID NO: 31749
  source 1..80: mol_type = other DNA

SEQ ID NO: 66002 - DNA, 80 bp, synthetic construct; identical to SEQ ID NO: 31750
  source 1..80: mol_type = other DNA

SEQ ID NO: 66003 - DNA, 80 bp, synthetic construct; identical to SEQ ID NO: 11827
  source 1..80: mol_type = other DNA

SEQ ID NO: 66004 - DNA, 80 bp, synthetic construct; identical to SEQ ID NO: 31752
  source 1..80: mol_type = other DNA

SEQ ID NO: 66005 - DNA, 80 bp, synthetic construct; identical to SEQ ID NO: 31753
  source 1..80: mol_type = other DNA

SEQ ID NO: 66006 - DNA, 80 bp, synthetic construct; identical to SEQ ID NO: 31754
  source 1..80: mol_type = other DNA

SEQ ID NO: 66007 - DNA, 80 bp, synthetic construct; identical to SEQ ID NO: 31755
  source 1..80: mol_type = other DNA

SEQ ID NO: 66008 - DNA, 80 bp, synthetic construct; identical to SEQ ID NO: 11828
  source 1..80: mol_type = other DNA

SEQ ID NO: 66009 - DNA, 80 bp, synthetic construct; identical to SEQ ID NO: 31758
  source 1..80: mol_type = other DNA

SEQ ID NO: 66010 - DNA, 80 bp, synthetic construct; identical to SEQ ID NO: 31759
  source 1..80: mol_type = other DNA

SEQ ID NO: 66011 - DNA, 80 bp, synthetic construct; identical to SEQ ID NO: 11829
  source 1..80: mol_type = other DNA

SEQ ID NO: 66012 - DNA, 80 bp, synthetic construct; identical to SEQ ID NO: 31761
  source 1..80: mol_type = other DNA

SEQ ID NO: 66013 - DNA, 80 bp, synthetic construct; identical to SEQ ID NO: 31762
  source 1..80: mol_type = other DNA

SEQ ID NO: 66014 - DNA, 80 bp, synthetic construct; identical to SEQ ID NO: 31763
  source 1..80: mol_type = other DNA

SEQ ID NO: 66015 - DNA, 80 bp, synthetic construct; identical to SEQ ID NO: 11830
  source 1..80: mol_type = other DNA

SEQ ID NO: 66016 - DNA, 80 bp, synthetic construct; identical to SEQ ID NO: 31765
  source 1..80: mol_type = other DNA

SEQ ID NO: 66017 - DNA, 80 bp, synthetic construct; identical to SEQ ID NO: 31766
  source 1..80: mol_type = other DNA

SEQ ID NO: 66018 - DNA, 80 bp, synthetic construct; identical to SEQ ID NO: 11831
  source 1..80: mol_type = other DNA

SEQ ID NO: 66019 - DNA, 80 bp, synthetic construct; identical to SEQ ID NO: 31768
  source 1..80: mol_type = other DNA

SEQ ID NO: 66020 - DNA, 80 bp, synthetic construct; identical to SEQ ID NO: 31769
  source 1..80: mol_type = other DNA

SEQ ID NO: 66021 - DNA, 80 bp, synthetic construct; identical to SEQ ID NO: 31770
  source 1..80: mol_type = other DNA

SEQ ID NO: 66022 - DNA, 80 bp, synthetic construct; identical to SEQ ID NO: 31771
  source 1..80: mol_type = other DNA

SEQ ID NO: 66023 - DNA, 80 bp, synthetic construct; identical to SEQ ID NO: 11832
  source 1..80: mol_type = other DNA

SEQ ID NO: 66024 - DNA, 80 bp, synthetic construct; identical to SEQ ID NO: 31773
  source 1..80: mol_type = other DNA

SEQ ID NO: 66025 - DNA, 80 bp, synthetic construct; identical to SEQ ID NO: 31774
  source 1..80: mol_type = other DNA

SEQ ID NO: 66026 - DNA, 80 bp, synthetic construct; identical to SEQ ID NO: 11833
  source 1..80: mol_type = other DNA

SEQ ID NO: 66027 - DNA, 80 bp, synthetic construct; identical to SEQ ID NO: 31776
  source 1..80: mol_type = other DNA

SEQ ID NO: 66028 - DNA, 80 bp, synthetic construct; identical to SEQ ID NO: 31777
  source 1..80: mol_type = other DNA

SEQ ID NO: 66029 - DNA, 80 bp, synthetic construct; identical to SEQ ID NO: 31778
  source 1..80: mol_type = other DNA

SEQ ID NO: 66030 - DNA, 80 bp, synthetic construct; identical to SEQ ID NO: 11834
  source 1..80: mol_type = other DNA

SEQ ID NO: 66031 - DNA, 80 bp, synthetic construct; identical to SEQ ID NO: 31780
  source 1..80: mol_type = other DNA

SEQ ID NO: 66032 - DNA, 80 bp, synthetic construct; identical to SEQ ID NO: 31781
  source 1..80: mol_type = other DNA

SEQ ID NO: 66033 - DNA, 80 bp, synthetic construct; identical to SEQ ID NO: 31782
  source 1..80: mol_type = other DNA

SEQ ID NO: 66034 - DNA, 80 bp, synthetic construct; identical to SEQ ID NO: 11835
  source 1..80: mol_type = other DNA

SEQ ID NO: 66035 - DNA, 80 bp, synthetic construct; identical to SEQ ID NO: 31784
  source 1..80: mol_type = other DNA

SEQ ID NO: 66036 - DNA, 80 bp, synthetic construct; identical to SEQ ID NO: 31785
  source 1..80: mol_type = other DNA

SEQ ID NO: 66037 - DNA, 80 bp, synthetic construct; identical to SEQ ID NO: 31786
  source 1..80: mol_type = other DNA

SEQ ID NO: 66038 - DNA, 80 bp, synthetic construct; identical to SEQ ID NO: 31787
  source 1..80: mol_type = other DNA

SEQ ID NO: 66039 - DNA, 80 bp, synthetic construct; identical to SEQ ID NO: 11836
  source 1..80: mol_type = other DNA

SEQ ID NO: 66040 - DNA, 80 bp, synthetic construct; identical to SEQ ID NO: 31789
  source 1..80: mol_type = other DNA

SEQ ID NO: 66041 - DNA, 80 bp, synthetic construct; identical to SEQ ID NO: 31790
  source 1..80: mol_type = other DNA

SEQ ID NO: 66042 - DNA, 80 bp, synthetic construct; identical to SEQ ID NO: 11837
  source 1..80: mol_type = other DNA

SEQ ID NO: 66043 - DNA, 80 bp, synthetic construct; identical to SEQ ID NO: 31792
  source 1..80: mol_type = other DNA

SEQ ID NO: 66044 - DNA, 80 bp, synthetic construct; identical to SEQ ID NO: 31793
  source 1..80: mol_type = other DNA

SEQ ID NO: 66045 - DNA, 80 bp, synthetic construct; identical to SEQ ID NO: 31794
  source 1..80: mol_type = other DNA

SEQ ID NO: 66046 - DNA, 80 bp, synthetic construct; identical to SEQ ID NO: 11838
  source 1..80: mol_type = other DNA

SEQ ID NO: 66047 - DNA, 80 bp, synthetic construct; identical to SEQ ID NO: 31796
  source 1..80: mol_type = other DNA

SEQ ID NO: 66048 - DNA, 80 bp, synthetic construct; identical to SEQ ID NO: 31797
  source 1..80: mol_type = other DNA

SEQ ID NO: 66049 - DNA, 80 bp, synthetic construct; identical to SEQ ID NO: 31798
  source 1..80: mol_type = other DNA

SEQ ID NO: 66050 - DNA, 80 bp, synthetic construct; identical to SEQ ID NO: 31799
  source 1..80: mol_type = other DNA

SEQ ID NO: 66051 - DNA, 80 bp, synthetic construct; identical to SEQ ID NO: 11839
  source 1..80: mol_type = other DNA

SEQ ID NO: 66052 - DNA, 80 bp, synthetic construct; identical to SEQ ID NO: 31801
  source 1..80: mol_type = other DNA

SEQ ID NO: 66053 - DNA, 80 bp, synthetic construct; identical to SEQ ID NO: 31802
  source 1..80: mol_type = other DNA

SEQ ID NO: 66054 - DNA, 80 bp, synthetic construct; identical to SEQ ID NO: 11840
  source 1..80: mol_type = other DNA

SEQ ID NO: 66055 - DNA, 80 bp, synthetic construct; identical to SEQ ID NO: 31804
  source 1..80: mol_type = other DNA

SEQ ID NO: 66056 - DNA, 80 bp, synthetic construct; identical to SEQ ID NO: 31805
  source 1..80: mol_type = other DNA

SEQ ID NO: 66057 - DNA, 80 bp, synthetic construct; identical to SEQ ID NO: 31806
  source 1..80: mol_type = other DNA

SEQ ID NO: 66058 - DNA, 80 bp, synthetic construct; identical to SEQ ID NO: 31807
  source 1..80: mol_type = other DNA

SEQ ID NO: 66059 - DNA, 80 bp, synthetic construct; identical to SEQ ID NO: 11841
  source 1..80: mol_type = other DNA

SEQ ID NO: 66060 - DNA, 80 bp, synthetic construct; identical to SEQ ID NO: 31809
  source 1..80: mol_type = other DNA

SEQ ID NO: 66061 - DNA, 80 bp, synthetic construct; identical to SEQ ID NO: 31810
  source 1..80: mol_type = other DNA

SEQ ID NO: 66062 - DNA, 80 bp, synthetic construct; identical to SEQ ID NO: 31811
  source 1..80: mol_type = other DNA

SEQ ID NO: 66063 - DNA, 80 bp, synthetic construct; identical to SEQ ID NO: 11842
  source 1..80: mol_type = other DNA

SEQ ID NO: 66064 - DNA, 80 bp, synthetic construct; identical to SEQ ID NO: 31813
  source 1..80: mol_type = other DNA

SEQ ID NO: 66065 - DNA, 80 bp, synthetic construct; identical to SEQ ID NO: 31814
  source 1..80: mol_type = other DNA

SEQ ID NO: 66066 - DNA, 80 bp, synthetic construct; identical to SEQ ID NO: 11843
  source 1..80: mol_type = other DNA

SEQ ID NO: 66067 - DNA, 80 bp, synthetic construct; identical to SEQ ID NO: 31816
  source 1..80: mol_type = other DNA

SEQ ID NO: 66068 - DNA, 80 bp, synthetic construct; identical to SEQ ID NO: 31817
  source 1..80: mol_type = other DNA

SEQ ID NO: 66069 - DNA, 80 bp, synthetic construct; identical to SEQ ID NO: 31818
  source 1..80: mol_type = other DNA

SEQ ID NO: 66070 - DNA, 80 bp, synthetic construct; identical to SEQ ID NO: 11844
  source 1..80: mol_type = other DNA

SEQ ID NO: 66071 - DNA, 80 bp, synthetic construct; identical to SEQ ID NO: 31820
  source 1..80: mol_type = other DNA

SEQ ID NO: 66072 - DNA, 80 bp, synthetic construct; identical to SEQ ID NO: 31821
  source 1..80: mol_type = other DNA

SEQ ID NO: 66073 - DNA, 80 bp, synthetic construct; identical to SEQ ID NO: 31822
  source 1..80: mol_type = other DNA

SEQ ID NO: 66074 - DNA, 80 bp, synthetic construct; identical to SEQ ID NO: 31823
  source 1..80: mol_type = other DNA

SEQ ID NO: 66075 - DNA, 80 bp, synthetic construct; identical to SEQ ID NO: 11845
  source 1..80: mol_type = other DNA

SEQ ID NO: 66076 - DNA, 80 bp, synthetic construct; identical to SEQ ID NO: 31825
  source 1..80: mol_type = other DNA

SEQ ID NO: 66077 - DNA, 80 bp, synthetic construct; identical to SEQ ID NO: 31826
  source 1..80: mol_type = other DNA

SEQ ID NO: 66078 - DNA, 80 bp, synthetic construct; identical to SEQ ID NO: 31827
  source 1..80: mol_type = other DNA

SEQ ID NO: 66079 - DNA, 80 bp, synthetic construct; identical to SEQ ID NO: 11846
  source 1..80: mol_type = other DNA

SEQ ID NO: 66080 - DNA, 80 bp, synthetic construct; identical to SEQ ID NO: 31829
  source 1..80: mol_type = other DNA

SEQ ID NO: 66081 - DNA, 80 bp, synthetic construct; identical to SEQ ID NO: 31830
  source 1..80: mol_type = other DNA

SEQ ID NO: 66082 - DNA, 80 bp, synthetic construct; identical to SEQ ID NO: 31831
  source 1..80: mol_type = other DNA

SEQ ID NO: 66083 - DNA, 80 bp, synthetic construct; identical to SEQ ID NO: 11847
  source 1..80: mol_type = other DNA

SEQ ID NO: 66084 - DNA, 80 bp, synthetic construct; identical to SEQ ID NO: 31834
  source 1..80: mol_type = other DNA

SEQ ID NO: 66085 - DNA, 80 bp, synthetic construct; identical to SEQ ID NO: 31835
  source 1..80: mol_type = other DNA

SEQ ID NO: 66086 - DNA, 80 bp, synthetic construct; identical to SEQ ID NO: 31836
  source 1..80: mol_type = other DNA

SEQ ID NO: 66087 - DNA, 80 bp, synthetic construct; identical to SEQ ID NO: 11848
  source 1..80: mol_type = other DNA

SEQ ID NO: 66088 - DNA, 80 bp, synthetic construct; identical to SEQ ID NO: 31838
  source 1..80: mol_type = other DNA

SEQ ID NO: 66089 - DNA, 80 bp, synthetic construct; identical to SEQ ID NO: 31839
  source 1..80: mol_type = other DNA

SEQ ID NO: 66090 - DNA, 80 bp, synthetic construct; identical to SEQ ID NO: 11849
  source 1..80: mol_type = other DNA

SEQ ID NO: 66091 - DNA, 80 bp, synthetic construct; identical to SEQ ID NO: 31842
  source 1..80: mol_type = other DNA

SEQ ID NO: 66092 - DNA, 80 bp, synthetic construct; identical to SEQ ID NO: 11850
  source 1..80: mol_type = other DNA

SEQ ID NO: 66093 - DNA, 80 bp, synthetic construct; identical to SEQ ID NO: 31846
  source 1..80: mol_type = other DNA

SEQ ID NO: 66094 - DNA, 80 bp, synthetic construct; identical to SEQ ID NO: 31847
  source 1..80: mol_type = other DNA

SEQ ID NO: 66095 - DNA, 80 bp, synthetic construct; identical to SEQ ID NO: 11851
  source 1..80: mol_type = other DNA

SEQ ID NO: 66096 - DNA, 80 bp, synthetic construct; identical to SEQ ID NO: 31850
  source 1..80: mol_type = other DNA

SEQ ID NO: 66097 - DNA, 80 bp, synthetic construct; identical to SEQ ID NO: 31851
  source 1..80: mol_type = other DNA

SEQ ID NO: 66098 - DNA, 80 bp, synthetic construct; identical to SEQ ID NO: 31852
  source 1..80: mol_type = other DNA

SEQ ID NO: 66099 - DNA, 80 bp, synthetic construct; identical to SEQ ID NO: 11852
  source 1..80: mol_type = other DNA

SEQ ID NO: 66100 - DNA, 80 bp, synthetic construct; identical to SEQ ID NO: 31854
  source 1..80: mol_type = other DNA

SEQ ID NO: 66101 - DNA, 80 bp, synthetic construct; identical to SEQ ID NO: 31855
  source 1..80: mol_type = other DNA

SEQ ID NO: 66102 - DNA, 80 bp, synthetic construct; identical to SEQ ID NO: 11853
  source 1..80: mol_type = other DNA

SEQ ID NO: 66103 - DNA, 80 bp, synthetic construct; identical to SEQ ID NO: 31857
  source 1..80: mol_type = other DNA

SEQ ID NO: 66104 - DNA, 80 bp, synthetic construct; identical to SEQ ID NO: 31858
  source 1..80: mol_type = other DNA

SEQ ID NO: 66105 - DNA, 80 bp, synthetic construct; identical to SEQ ID NO: 31859
  source 1..80: mol_type = other DNA

SEQ ID NO: 66106 - DNA, 80 bp, synthetic construct; identical to SEQ ID NO: 11854
  source 1..80: mol_type = other DNA

SEQ ID NO: 66107 - DNA, 80 bp, synthetic construct; identical to SEQ ID NO: 31861
  source 1..80: mol_type = other DNA

SEQ ID NO: 66108 - DNA, 80 bp, synthetic construct; identical to SEQ ID NO: 31862
  source 1..80: mol_type = other DNA

SEQ ID NO: 66109 - DNA, 80 bp, synthetic construct; identical to SEQ ID NO: 31863
  source 1..80: mol_type = other DNA

SEQ ID NO: 66110 - DNA, 80 bp, synthetic construct; identical to SEQ ID NO: 11855
  source 1..80: mol_type = other DNA

SEQ ID NO: 66111 - DNA, 80 bp, synthetic construct; identical to SEQ ID NO: 31865
  source 1..80: mol_type = other DNA

SEQ ID NO: 66112 - DNA, 80 bp, synthetic construct; identical to SEQ ID NO: 31866
  source 1..80: mol_type = other DNA

SEQ ID NO: 66113 - DNA, 80 bp, synthetic construct; identical to SEQ ID NO: 31867
  source 1..80: mol_type = other DNA

SEQ ID NO: 66114 - DNA, 80 bp, synthetic construct; identical to SEQ ID NO: 11856
  source 1..80: mol_type = other DNA

SEQ ID NO: 66115 - DNA, 80 bp, synthetic construct; identical to SEQ ID NO: 31869
  source 1..80: mol_type = other DNA

SEQ ID NO: 66116 - DNA, 80 bp, synthetic construct; identical to SEQ ID NO: 31871
  source 1..80: mol_type = other DNA

SEQ ID NO: 66117 - DNA, 80 bp, synthetic construct; identical to SEQ ID NO: 11857
  source 1..80: mol_type = other DNA

SEQ ID NO: 66118 - DNA, 80 bp, synthetic construct; identical to SEQ ID NO: 31874
  source 1..80: mol_type = other DNA

SEQ ID NO: 66119 - DNA, 80 bp, synthetic construct; identical to SEQ ID NO: 31875
  source 1..80: mol_type = other DNA

SEQ ID NO: 66120 - DNA, 80 bp, synthetic construct; identical to SEQ ID NO: 11858
  source 1..80: mol_type = other DNA

SEQ ID NO: 66121 - DNA, 80 bp, synthetic construct; identical to SEQ ID NO: 31878
  source 1..80: mol_type = other DNA

SEQ ID NO: 66122 - DNA, 80 bp, synthetic construct; identical to SEQ ID NO: 31879
  source 1..80: mol_type = other DNA

SEQ ID NO: 66123 - DNA, 80 bp, synthetic construct; identical to SEQ ID NO: 11859
  source 1..80: mol_type = other DNA

SEQ ID NO: 66124 - DNA, 80 bp, synthetic construct; identical to SEQ ID NO: 31882
  source 1..80: mol_type = other DNA

SEQ ID NO: 66125 - DNA, 80 bp, synthetic construct; identical to SEQ ID NO: 31883
  source 1..80: mol_type = other DNA

SEQ ID NO: 66126 - DNA, 80 bp, synthetic construct; identical to SEQ ID NO: 11860
  source 1..80: mol_type = other DNA

SEQ ID NO: 66127 - DNA, 80 bp, synthetic construct; identical to SEQ ID NO: 31885
  source 1..80: mol_type = other DNA

SEQ ID NO: 66128 - DNA, 80 bp, synthetic construct; identical to SEQ ID NO: 31886
  source 1..80: mol_type = other DNA

SEQ ID NO: 66129 - DNA, 80 bp, synthetic construct; identical to SEQ ID NO: 31887
  source 1..80: mol_type = other DNA

SEQ ID NO: 66130 - DNA, 80 bp, synthetic construct; identical to SEQ ID NO: 11861
  source 1..80: mol_type = other DNA

SEQ ID NO: 66131 - DNA, 80 bp, synthetic construct; identical to SEQ ID NO: 31889
  source 1..80: mol_type = other DNA

SEQ ID NO: 66132 - DNA, 80 bp, synthetic construct; identical to SEQ ID NO: 31890
  source 1..80: mol_type = other DNA

SEQ ID NO: 66133 - DNA, 80 bp, synthetic construct; identical to SEQ ID NO: 31891
  source 1..80: mol_type = other DNA

SEQ ID NO: 66134 - DNA, 80 bp, synthetic construct; identical to SEQ ID NO: 11862
  source 1..80: mol_type = other DNA

SEQ ID NO: 66135 - DNA, 80 bp, synthetic construct; identical to SEQ ID NO: 31893
  source 1..80: mol_type = other DNA

SEQ ID NO: 66136 - DNA, 80 bp, synthetic construct; identical to SEQ ID NO: 31894
  source 1..80: mol_type = other DNA

SEQ ID NO: 66137 - DNA, 80 bp, synthetic construct; identical to SEQ ID NO: 31895
  source 1..80: mol_type = other DNA

SEQ ID NO: 66138 - DNA, 80 bp, synthetic construct; identical to SEQ ID NO: 11863
  source 1..80: mol_type = other DNA

SEQ ID NO: 66139 - DNA, 80 bp, synthetic construct; identical to SEQ ID NO: 31897
  source 1..80: mol_type = other DNA

SEQ ID NO: 66140 - DNA, 80 bp, synthetic construct; identical to SEQ ID NO: 31898
  source 1..80: mol_type = other DNA

SEQ ID NO: 66141 - DNA, 80 bp, synthetic construct; identical to SEQ ID NO: 31899
  source 1..80: mol_type = other DNA

SEQ ID NO: 66142 - DNA, 80 bp, synthetic construct; identical to SEQ ID NO: 11864
  source 1..80: mol_type = other DNA

SEQ ID NO: 66143 - DNA, 80 bp, synthetic construct; identical to SEQ ID NO: 31901
  source 1..80: mol_type = other DNA

SEQ ID NO: 66144 - DNA, 80 bp, synthetic construct; identical to SEQ ID NO: 31902
  source 1..80: mol_type = other DNA

SEQ ID NO: 66145 - DNA, 80 bp, synthetic construct; identical to SEQ ID NO: 31903
  source 1..80: mol_type = other DNA

SEQ ID NO: 66146 - DNA, 80 bp, synthetic construct; identical to SEQ ID NO: 11865
  source 1..80: mol_type = other DNA

SEQ ID NO: 66147 - DNA, 80 bp, synthetic construct; identical to SEQ ID NO: 31905
  source 1..80: mol_type = other DNA

SEQ ID NO: 66148 - DNA, 80 bp, synthetic construct; identical to SEQ ID NO: 31906
  source 1..80: mol_type = other DNA

SEQ ID NO: 66149 - DNA, 80 bp, synthetic construct; identical to SEQ ID NO: 31907
  source 1..80: mol_type = other DNA

SEQ ID NO: 66150 - DNA, 80 bp, synthetic construct; identical to SEQ ID NO: 31908
  source 1..80: mol_type = other DNA

SEQ ID NO: 66151 - DNA, 80 bp, synthetic construct; identical to SEQ ID NO: 11866
  source 1..80: mol_type = other DNA

SEQ ID NO: 66152 - DNA, 80 bp, synthetic construct; identical to SEQ ID NO: 31910
  source 1..80: mol_type = other DNA

SEQ ID NO: 66153 - DNA, 80 bp, synthetic construct; identical to SEQ ID NO: 31911
  source 1..80: mol_type = other DNA

SEQ ID NO: 66154 - DNA, 80 bp, synthetic construct; identical to SEQ ID NO: 11867
  source 1..80: mol_type = other DNA

SEQ ID NO: 66155 - DNA, 80 bp, synthetic construct; identical to SEQ ID NO: 31913
  source 1..80: mol_type = other DNA

SEQ ID NO: 66156 - DNA, 80 bp, synthetic construct; identical to SEQ ID NO: 31914
  source 1..80: mol_type = other DNA

SEQ ID NO: 66157 - DNA, 80 bp, synthetic construct; identical to SEQ ID NO: 31915
  source 1..80: mol_type = other DNA

SEQ ID NO: 66158 - DNA, 80 bp, synthetic construct; identical to SEQ ID NO: 11868
  source 1..80: mol_type = other DNA

SEQ ID NO: 66159 - DNA, 80 bp, synthetic construct; identical to SEQ ID NO: 31917
  source 1..80: mol_type = other DNA

SEQ ID NO: 66160 - DNA, 80 bp, synthetic construct; identical to SEQ ID NO: 31918
  source 1..80: mol_type = other DNA

SEQ ID NO: 66161 - DNA, 80 bp, synthetic construct; identical to SEQ ID NO: 31919
  source 1..80: mol_type = other DNA

SEQ ID NO: 66162 - DNA, 80 bp, synthetic construct; identical to SEQ ID NO: 31920
  source 1..80: mol_type = other DNA

SEQ ID NO: 66163 - DNA, 80 bp, synthetic construct; identical to SEQ ID NO: 11869
  source 1..80: mol_type = other DNA

SEQ ID NO: 66164 - DNA, 80 bp, synthetic construct; identical to SEQ ID NO: 31922
  source 1..80: mol_type = other DNA

SEQ ID NO: 66165 - DNA, 80 bp, synthetic construct; identical to SEQ ID NO: 31923
  source 1..80: mol_type = other DNA

SEQ ID NO: 66166 - DNA, 80 bp, synthetic construct; identical to SEQ ID NO: 11870
  source 1..80: mol_type = other DNA

SEQ ID NO: 66167 - DNA, 80 bp, synthetic construct; identical to SEQ ID NO: 31925
  source 1..80: mol_type = other DNA

SEQ ID NO: 66168 - DNA, 80 bp, synthetic construct; identical to SEQ ID NO: 31926
  source 1..80: mol_type = other DNA

SEQ ID NO: 66169 - DNA, 80 bp, synthetic construct; identical to SEQ ID NO: 11871
  source 1..80: mol_type = other DNA

SEQ ID NO: 66170 - DNA, 80 bp, synthetic construct; identical to SEQ ID NO: 31928
  source 1..80: mol_type = other DNA

SEQ ID NO: 66171 - DNA, 80 bp, synthetic construct; identical to SEQ ID NO: 31929
  source 1..80: mol_type = other DNA

SEQ ID NO: 66172 - DNA, 80 bp, synthetic construct; identical to SEQ ID NO: 31930
  source 1..80: mol_type = other DNA

SEQ ID NO: 66173 - DNA, 80 bp, synthetic construct; identical to SEQ ID NO: 11872
  source 1..80: mol_type = other DNA

SEQ ID NO: 66174 - DNA, 80 bp, synthetic construct; identical to SEQ ID NO: 31932
  source 1..80: mol_type = other DNA

SEQ ID NO: 66175 - DNA, 80 bp, synthetic construct; identical to SEQ ID NO: 31933
  source 1..80: mol_type = other DNA

SEQ ID NO: 66176 - DNA, 80 bp, synthetic construct; identical to SEQ ID NO: 31934
  source 1..80: mol_type = other DNA

SEQ ID NO: 66177 - DNA, 80 bp, synthetic construct; identical to SEQ ID NO: 11873
  source 1..80: mol_type = other DNA

SEQ ID NO: 66178 - DNA, 80 bp, synthetic construct; identical to SEQ ID NO: 31936
  source 1..80: mol_type = other DNA

SEQ ID NO: 66179 - DNA, 80 bp, synthetic construct; identical to SEQ ID NO: 31937
  source 1..80: mol_type = other DNA

SEQ ID NO: 66180 - DNA, 80 bp, synthetic construct; identical to SEQ ID NO: 31938
  source 1..80: mol_type = other DNA

SEQ ID NO: 66181 - DNA, 80 bp, synthetic construct; identical to SEQ ID NO: 31939
  source 1..80: mol_type = other DNA

SEQ ID NO: 66182 - DNA, 80 bp, synthetic construct; identical to SEQ ID NO: 11874
  source 1..80: mol_type = other DNA

SEQ ID NO: 66183 - DNA, 80 bp, synthetic construct; identical to SEQ ID NO: 31941
  source 1..80: mol_type = other DNA

SEQ ID NO: 66184 - DNA, 80 bp, synthetic construct; identical to SEQ ID NO: 31942
  source 1..80: mol_type = other DNA

SEQ ID NO: 66185 - DNA, 80 bp, synthetic construct; identical to SEQ ID NO: 31943
  source 1..80: mol_type = other DNA

SEQ ID NO: 66186 - DNA, 80 bp, synthetic construct; identical to SEQ ID NO: 11875
  source 1..80: mol_type = other DNA

SEQ ID NO: 66187 - DNA, 80 bp, synthetic construct; identical to SEQ ID NO: 31945
  source 1..80: mol_type = other DNA

SEQ ID NO: 66188 - DNA, 80 bp, synthetic construct; identical to SEQ ID NO: 31946
  source 1..80: mol_type = other DNA

SEQ ID NO: 66189 - DNA, 80 bp, synthetic construct; identical to SEQ ID NO: 31947
  source 1..80: mol_type = other DNA

SEQ ID NO: 66190 - DNA, 80 bp, synthetic construct; identical to SEQ ID NO: 11876
  source 1..80: mol_type = other DNA

SEQ ID NO: 66191 - DNA, 80 bp, synthetic construct; identical to SEQ ID NO: 31949
  source 1..80: mol_type = other DNA

SEQ ID NO: 66192 - DNA, 80 bp, synthetic construct; identical to SEQ ID NO: 31950
  source 1..80: mol_type = other DNA

SEQ ID NO: 66193 - DNA, 80 bp, synthetic construct; identical to SEQ ID NO: 11877
  source 1..80: mol_type = other DNA

SEQ ID NO: 66194 - DNA, 80 bp, synthetic construct; identical to SEQ ID NO: 31952
  source 1..80: mol_type = other DNA

SEQ ID NO: 66195 - DNA, 80 bp, synthetic construct; identical to SEQ ID NO: 31953
  source 1..80: mol_type = other DNA

SEQ ID NO: 66196 - DNA, 80 bp, synthetic construct; identical to SEQ ID NO: 31954
  source 1..80: mol_type = other DNA

SEQ ID NO: 66197 - DNA, 80 bp, synthetic construct; identical to SEQ ID NO: 31955
  source 1..80: mol_type = other DNA

SEQ ID NO: 66198 - DNA, 80 bp, synthetic construct; identical to SEQ ID NO: 11878
  source 1..80: mol_type = other DNA

SEQ ID NO: 66199 - DNA, 80 bp, synthetic construct; identical to SEQ ID NO: 31958
  source 1..80: mol_type = other DNA

SEQ ID NO: 66200 - DNA, 80 bp, synthetic construct; identical to SEQ ID NO: 11879
  source 1..80: mol_type = other DNA

SEQ ID NO: 66201 - DNA, 80 bp, synthetic construct; identical to SEQ ID NO: 31960
  source 1..80: mol_type = other DNA

SEQ ID NO: 66202 - DNA, 80 bp, synthetic construct; identical to SEQ ID NO: 31961
  source 1..80: mol_type = other DNA

SEQ ID NO: 66203 - DNA, 80 bp, synthetic construct; identical to SEQ ID NO: 31962
  source 1..80: mol_type = other DNA

SEQ ID NO: 66204 - DNA, 80 bp, synthetic construct; identical to SEQ ID NO: 11880
  source 1..80: mol_type = other DNA

SEQ ID NO: 66205 - DNA, 80 bp, synthetic construct; identical to SEQ ID NO: 31964
  source 1..80: mol_type = other DNA

SEQ ID NO: 66206 - DNA, 80 bp, synthetic construct; identical to SEQ ID NO: 31966
  source 1..80: mol_type = other DNA

SEQ ID NO: 66207 - DNA, 80 bp, synthetic construct; identical to SEQ ID NO: 31967
  source 1..80: mol_type = other DNA

SEQ ID NO: 66208 - DNA, 80 bp, synthetic construct; identical to SEQ ID NO: 11881
  source 1..80: mol_type = other DNA

SEQ ID NO: 66209 - DNA, 80 bp, synthetic construct; identical to SEQ ID NO: 31969
  source 1..80: mol_type = other DNA

SEQ ID NO: 66210 - DNA, 80 bp, synthetic construct; identical to SEQ ID NO: 31970
  source 1..80: mol_type = other DNA

SEQ ID NO: 66211 - DNA, 80 bp, synthetic construct; identical to SEQ ID NO: 11882
  source 1..80: mol_type = other DNA

SEQ ID NO: 66212 - DNA, 80 bp, synthetic construct; identical to SEQ ID NO: 31973
  source 1..80: mol_type = other DNA

SEQ ID NO: 66213 - DNA, 80 bp, synthetic construct; identical to SEQ ID NO: 31974
  source 1..80: mol_type = other DNA

SEQ ID NO: 66214 - DNA, 80 bp, synthetic construct; identical to SEQ ID NO: 11883
  source 1..80: mol_type = other DNA

SEQ ID NO: 66215 - DNA, 80 bp, synthetic construct; identical to SEQ ID NO: 31976
  source 1..80: mol_type = other DNA

SEQ ID NO: 66216 - DNA, 80 bp, synthetic construct; identical to SEQ ID NO: 31977
  source 1..80: mol_type = other DNA

SEQ ID NO: 66217 - DNA, 80 bp, synthetic construct; identical to SEQ ID NO: 31978
  source 1..80: mol_type = other DNA

SEQ ID NO: 66218 - DNA, 80 bp, synthetic construct; identical to SEQ ID NO: 11884
  source 1..80: mol_type = other DNA

SEQ ID NO: 66219 - DNA, 80 bp, synthetic construct; identical to SEQ ID NO: 31981
  source 1..80: mol_type = other DNA

SEQ ID NO: 66220 - DNA, 80 bp, synthetic construct; identical to SEQ ID NO: 31982
  source 1..80: mol_type = other DNA

SEQ ID NO: 66221 - DNA, 80 bp, synthetic construct; identical to SEQ ID NO: 11885
  source 1..80: mol_type = other DNA

SEQ ID NO: 66222 - DNA, 80 bp, synthetic construct; identical to SEQ ID NO: 31984
  source 1..80: mol_type = other DNA

SEQ ID NO: 66223 - DNA, 80 bp, synthetic construct; identical to SEQ ID NO: 31985
  source 1..80: mol_type = other DNA

SEQ ID NO: 66224 - DNA, 80 bp, synthetic construct; identical to SEQ ID NO: 31986
  source 1..80: mol_type = other DNA

SEQ ID NO: 66225 - DNA, 80 bp, synthetic construct; identical to SEQ ID NO: 31987
  source 1..80: mol_type = other DNA

SEQ ID NO: 66226 - DNA, 80 bp, synthetic construct; identical to SEQ ID NO: 11886
  source 1..80: mol_type = other DNA

SEQ ID NO: 66227 - DNA, 80 bp, synthetic construct; identical to SEQ ID NO: 31989
  source 1..80: mol_type = other DNA

SEQ ID NO: 66228 - DNA, 80 bp, synthetic construct; identical to SEQ ID NO: 31990
  source 1..80: mol_type = other DNA

SEQ ID NO: 66229 - DNA, 80 bp, synthetic construct; identical to SEQ ID NO: 31991
  source 1..80: mol_type = other DNA

SEQ ID NO: 66230 - DNA, 80 bp, synthetic construct; identical to SEQ ID NO: 11887
  source 1..80: mol_type = other DNA

SEQ ID NO: 66231 - DNA, 80 bp, synthetic construct; identical to SEQ ID NO: 31993
  source 1..80: mol_type = other DNA

SEQ ID NO: 66232 - DNA, 80 bp, synthetic construct; identical to SEQ ID NO: 31994
  source 1..80: mol_type = other DNA

SEQ ID NO: 66233 - DNA, 80 bp, synthetic construct; identical to SEQ ID NO: 11888
  source 1..80: mol_type = other DNA

SEQ ID NO: 66234 - DNA, 80 bp, synthetic construct; identical to SEQ ID NO: 31996
  source 1..80: mol_type = other DNA

SEQ ID NO: 66235 - DNA, 80 bp, synthetic construct; identical to SEQ ID NO: 31997
  source 1..80: mol_type = other DNA

SEQ ID NO: 66236 - DNA, 80 bp, synthetic construct; identical to SEQ ID NO: 31998
  source 1..80: mol_type = other DNA

SEQ ID NO: 66237 - DNA, 80 bp, synthetic construct; identical to SEQ ID NO: 11889
  source 1..80: mol_type = other DNA

SEQ ID NO: 66238 - DNA, 80 bp, synthetic construct; identical to SEQ ID NO: 32000
  source 1..80: mol_type = other DNA

SEQ ID NO: 66239 - DNA, 80 bp, synthetic construct; identical to SEQ ID NO: 32001
  source 1..80: mol_type = other DNA

SEQ ID NO: 66240 - DNA, 80 bp, synthetic construct; identical to SEQ ID NO: 32002
  source 1..80: mol_type = other DNA

SEQ ID NO: 66241 - DNA, 80 bp, synthetic construct; identical to SEQ ID NO: 11890
  source 1..80: mol_type = other DNA

SEQ ID NO: 66242 - DNA, 80 bp, synthetic construct; identical to SEQ ID NO: 32004
  source 1..80: mol_type = other DNA

SEQ ID NO: 66243 - DNA, 80 bp, synthetic construct; identical to SEQ ID NO: 32005
  source 1..80: mol_type = other DNA

SEQ ID NO: 66244 - DNA, 80 bp, synthetic construct; identical to SEQ ID NO: 32006
  source 1..80: mol_type = other DNA

SEQ ID NO: 66245 - DNA, 80 bp, synthetic construct; identical to SEQ ID NO: 11891
  source 1..80: mol_type = other DNA

SEQ ID NO: 66246 - DNA, 80 bp, synthetic construct; identical to SEQ ID NO: 32008
  source 1..80: mol_type = other DNA

SEQ ID NO: 66247 - DNA, 80 bp, synthetic construct; identical to SEQ ID NO: 32009
  source 1..80: mol_type = other DNA

SEQ ID NO: 66248 - DNA, 80 bp, synthetic construct; identical to SEQ ID NO: 32010
  source 1..80: mol_type = other DNA

SEQ ID NO: 66249 - DNA, 80 bp, synthetic construct; identical to SEQ ID NO: 32011
  source 1..80: mol_type = other DNA

SEQ ID NO: 66250 - DNA, 80 bp, synthetic construct; identical to SEQ ID NO: 11892
  source 1..80: mol_type = other DNA

SEQ ID NO: 66251 - DNA, 80 bp, synthetic construct; identical to SEQ ID NO: 32013
  source 1..80: mol_type = other DNA

SEQ ID NO: 66252 - DNA, 80 bp, synthetic construct; identical to SEQ ID NO: 32014
  source 1..80: mol_type = other DNA

SEQ ID NO: 66253 - DNA, 80 bp, synthetic construct; identical to SEQ ID NO: 32015
  source 1..80: mol_type = other DNA

SEQ ID NO: 66254 - DNA, 80 bp, synthetic construct; identical to SEQ ID NO: 11893
  source 1..80: mol_type = other DNA

SEQ ID NO: 66255 - DNA, 80 bp, synthetic construct; identical to SEQ ID NO: 32017
  source 1..80: mol_type = other DNA

SEQ ID NO: 66256 - DNA, 80 bp, synthetic construct; identical to SEQ ID NO: 11894
  source 1..80: mol_type = other DNA

SEQ ID NO: 66257 - DNA, 80 bp, synthetic construct; identical to SEQ ID NO: 32020
  source 1..80: mol_type = other DNA

SEQ ID NO: 66258 - DNA, 80 bp, synthetic construct; identical to SEQ ID NO: 32021
  source 1..80: mol_type = other DNA

SEQ ID NO: 66259 - DNA, 80 bp, synthetic construct; identical to SEQ ID NO: 32022
  source 1..80: mol_type = other DNA

SEQ ID NO: 66260 - DNA, 80 bp, synthetic construct; identical to SEQ ID NO: 32023
  source 1..80: mol_type = other DNA

SEQ ID NO: 66261 - DNA, 80 bp, synthetic construct; identical to SEQ ID NO: 11895
  source 1..80: mol_type = other DNA

SEQ ID NO: 66262 - DNA, 80 bp, synthetic construct; identical to SEQ ID NO: 32025
  source 1..80: mol_type = other DNA

SEQ ID NO: 66263 - DNA, 80 bp, synthetic construct; identical to SEQ ID NO: 32026
  source 1..80: mol_type = other DNA

SEQ ID NO: 66264 - DNA, 80 bp, synthetic construct; identical to SEQ ID NO: 32027
  source 1..80: mol_type = other DNA

SEQ ID NO: 66265 - DNA, 80 bp, synthetic construct; identical to SEQ ID NO: 11896
  source 1..80: mol_type = other DNA

SEQ ID NO: 66266 - DNA, 80 bp, synthetic construct; identical to SEQ ID NO: 32029
  source 1..80: mol_type = other DNA

SEQ ID NO: 66267 - DNA, 80 bp, synthetic construct; identical to SEQ ID NO: 32030
  source 1..80: mol_type = other DNA

SEQ ID NO: 66268 - DNA, 80 bp, synthetic construct; identical to SEQ ID NO: 11897
  source 1..80: mol_type = other DNA

SEQ ID NO: 66269 - DNA, 80 bp, synthetic construct; identical to SEQ ID NO: 32032
  source 1..80: mol_type = other DNA

SEQ ID NO: 66270 - DNA, 80 bp, synthetic construct; identical to SEQ ID NO: 32033
  source 1..80: mol_type = other DNA

SEQ ID NO: 66271 - DNA, 80 bp, synthetic construct; identical to SEQ ID NO: 32034
  source 1..80: mol_type = other DNA

SEQ ID NO: 66272 - DNA, 80 bp, synthetic construct; identical to SEQ ID NO: 32035
  source 1..80: mol_type = other DNA

SEQ ID NO: 66273 - DNA, 80 bp, synthetic construct; identical to SEQ ID NO: 11898
  source 1..80: mol_type = other DNA

SEQ ID NO: 66274 - DNA, 80 bp, synthetic construct; identical to SEQ ID NO: 32037
  source 1..80: mol_type = other DNA

SEQ ID NO: 66275 - DNA, 80 bp, synthetic construct; identical to SEQ ID NO: 32038
  source 1..80: mol_type = other DNA

SEQ ID NO: 66276 - DNA, 80 bp, synthetic construct; identical to SEQ ID NO: 32039
  source 1..80: mol_type = other DNA

SEQ ID NO: 66277 - DNA, 80 bp, synthetic construct; identical to SEQ ID NO: 11899
  source 1..80: mol_type = other DNA

SEQ ID NO: 66278 - DNA, 80 bp, synthetic construct; identical to SEQ ID NO: 32041
  source 1..80: mol_type = other DNA

SEQ ID NO: 66279 - DNA, 80 bp, synthetic construct; identical to SEQ ID NO: 32042
  source 1..80: mol_type = other DNA

SEQ ID NO: 66280 - DNA, 80 bp, synthetic construct; identical to SEQ ID NO: 32043
  source 1..80: mol_type = other DNA

SEQ ID NO: 66281 - DNA, 80 bp, synthetic construct; identical to SEQ ID NO: 11900
  source 1..80: mol_type = other DNA

SEQ ID NO: 66282 - DNA, 80 bp, synthetic construct; identical to SEQ ID NO: 32045
  source 1..80: mol_type = other DNA

SEQ ID NO: 66283 - DNA, 80 bp, synthetic construct; identical to SEQ ID NO: 32046
  source 1..80: mol_type = other DNA

SEQ ID NO: 66284 - DNA, 80 bp, synthetic construct; identical to SEQ ID NO: 11901
  source 1..80: mol_type = other DNA

SEQ ID NO: 66285 - DNA, 80 bp, synthetic construct; identical to SEQ ID NO: 32049
  source 1..80: mol_type = other DNA

SEQ ID NO: 66286 - DNA, 80 bp, synthetic construct; identical to SEQ ID NO: 32050
  source 1..80: mol_type = other DNA

SEQ ID NO: 66287 - DNA, 80 bp, synthetic construct; identical to SEQ ID NO: 32051
  source 1..80: mol_type = other DNA

SEQ ID NO: 66288 - DNA, 80 bp, synthetic construct; identical to SEQ ID NO: 11902
  source 1..80: mol_type = other DNA

SEQ ID NO: 66289 - DNA, 80 bp, synthetic construct; identical to SEQ ID NO: 32053
  source 1..80: mol_type = other DNA

SEQ ID NO: 66290 - DNA, 80 bp, synthetic construct; identical to SEQ ID NO: 32054
  source 1..80: mol_type = other DNA

SEQ ID NO: 66291 - DNA, 80 bp, synthetic construct; identical to SEQ ID NO: 32055
  source 1..80: mol_type = other DNA

SEQ ID NO: 66292 - DNA, 80 bp, synthetic construct; identical to SEQ ID NO: 11903
  source 1..80: mol_type = other DNA

SEQ ID NO: 66293 - DNA, 80 bp, synthetic construct; identical to SEQ ID NO: 32057
  source 1..80: mol_type = other DNA

SEQ ID NO: 66294 - DNA, 80 bp, synthetic construct; identical to SEQ ID NO: 32058
  source 1..80: mol_type = other DNA

SEQ ID NO: 66295 - DNA, 80 bp, synthetic construct; identical to SEQ ID NO: 32059
  source 1..80: mol_type = other DNA

SEQ ID NO: 66296 - DNA, 80 bp, synthetic construct; identical to SEQ ID NO: 11904
  source 1..80: mol_type = other DNA

SEQ ID NO: 66297 - DNA, 80 bp, synthetic construct; identical to SEQ ID NO: 32061
  source 1..80: mol_type = other DNA

SEQ ID NO: 66298 - DNA, 80 bp, synthetic construct; identical to SEQ ID NO: 32062
  source 1..80: mol_type = other DNA

SEQ ID NO: 66299 - DNA, 80 bp, synthetic construct; identical to SEQ ID NO: 32063
  source 1..80: mol_type = other DNA

SEQ ID NO: 66300 - DNA, 80 bp, synthetic construct; identical to SEQ ID NO: 32064
  source 1..80: mol_type = other DNA

SEQ ID NO: 66301 - DNA, 80 bp, synthetic construct; identical to SEQ ID NO: 11905
  source 1..80: mol_type = other DNA

SEQ ID NO: 66302 - DNA, 80 bp, synthetic construct; identical to SEQ ID NO: 32066
  source 1..80: mol_type = other DNA

SEQ ID NO: 66303 - DNA, 80 bp, synthetic construct; identical to SEQ ID NO: 32067
  source 1..80: mol_type = other DNA

SEQ ID NO: 66304 - DNA, 80 bp, synthetic construct; identical to SEQ ID NO: 11906
  source 1..80: mol_type = other DNA

SEQ ID NO: 66305 - DNA, 80 bp, synthetic construct; identical to SEQ ID NO: 32069
  source 1..80: mol_type = other DNA

SEQ ID NO: 66306 - DNA, 80 bp, synthetic construct; identical to SEQ ID NO: 32070
  source 1..80: mol_type = other DNA

SEQ ID NO: 66307 - DNA, 80 bp, synthetic construct; identical to SEQ ID NO: 32071
  source 1..80: mol_type = other DNA

SEQ ID NO: 66308 - DNA, 80 bp, synthetic construct; identical to SEQ ID NO: 32072
  source 1..80: mol_type = other DNA

SEQ ID NO: 66309 - DNA, 80 bp, synthetic construct; identical to SEQ ID NO: 11907
  source 1..80: mol_type = other DNA

SEQ ID NO: 66310 - DNA, 80 bp, synthetic construct; identical to SEQ ID NO: 11908
  source 1..80: mol_type = other DNA

SEQ ID NO: 66311 - DNA, 80 bp, synthetic construct; identical to SEQ ID NO: 32076
  source 1..80: mol_type = other DNA

SEQ ID NO: 66312 - DNA, 80 bp, synthetic construct; identical to SEQ ID NO: 32077
  source 1..80: mol_type = other DNA

SEQ ID NO: 66313 - DNA, 80 bp, synthetic construct; identical to SEQ ID NO: 32078
  source 1..80: mol_type = other DNA

SEQ ID NO: 66314 - DNA, 80 bp, synthetic construct; identical to SEQ ID NO: 32079
  source 1..80: mol_type = other DNA

SEQ ID NO: 66315 - DNA, 80 bp, synthetic construct; identical to SEQ ID NO: 32080
  source 1..80: mol_type = other DNA

SEQ ID NO: 66316 - DNA, 80 bp, synthetic construct; identical to SEQ ID NO: 11909
  source 1..80: mol_type = other DNA

SEQ ID NO: 66317 - DNA, 80 bp, synthetic construct; identical to SEQ ID NO: 32082
  source 1..80: mol_type = other DNA

SEQ ID NO: 66318 - DNA, 80 bp, synthetic construct; identical to SEQ ID NO: 32083
  source 1..80: mol_type = other DNA

SEQ ID NO: 66319 - DNA, 80 bp, synthetic construct; identical to SEQ ID NO: 32084
  source 1..80: mol_type = other DNA

SEQ ID NO: 66320 - DNA, 80 bp, synthetic construct; identical to SEQ ID NO: 11910
  source 1..80: mol_type = other DNA

SEQ ID NO: 66321 - DNA, 80 bp, synthetic construct; identical to SEQ ID NO: 32086
  source 1..80: mol_type = other DNA

SEQ ID NO: 66322 - DNA, 80 bp, synthetic construct; identical to SEQ ID NO: 32087
  source 1..80: mol_type = other DNA

SEQ ID NO: 66323 - DNA, 80 bp, synthetic construct; identical to SEQ ID NO: 32088
  source 1..80: mol_type = other DNA

SEQ ID NO: 66324 - DNA, 80 bp, synthetic construct; identical to SEQ ID NO: 32089
  source 1..80: mol_type = other DNA

SEQ ID NO: 66325 - DNA, 80 bp, synthetic construct; identical to SEQ ID NO: 32090
  source 1..80: mol_type = other DNA

SEQ ID NO: 66326 - DNA, 80 bp, synthetic construct; identical to SEQ ID NO: 32091
  source 1..80: mol_type = other DNA

SEQ ID NO: 66327 - DNA, 80 bp, synthetic construct; identical to SEQ ID NO: 11912
  source 1..80: mol_type = other DNA

SEQ ID NO: 66328 - DNA, 80 bp, synthetic construct; identical to SEQ ID NO: 32093
  source 1..80: mol_type = other DNA

SEQ ID NO: 66329 - DNA, 80 bp, synthetic construct; identical to SEQ ID NO: 32094
  source 1..80: mol_type = other DNA

SEQ ID NO: 66330 - DNA, 80 bp, synthetic construct; identical to SEQ ID NO: 11913
  source 1..80: mol_type = other DNA

SEQ ID NO: 66331 - DNA, 80 bp, synthetic construct; identical to SEQ ID NO: 32096
  source 1..80: mol_type = other DNA

SEQ ID NO: 66332 - DNA, 80 bp, synthetic construct; identical to SEQ ID NO: 32097
  source 1..80: mol_type = other DNA

SEQ ID NO: 66333 - DNA, 80 bp, synthetic construct; identical to SEQ ID NO: 32098
  source 1..80: mol_type = other DNA

SEQ ID NO: 66334 - DNA, 80 bp, synthetic construct; identical to SEQ ID NO: 11914
  source 1..80: mol_type = other DNA

SEQ ID NO: 66335 - DNA, 80 bp, synthetic construct; identical to SEQ ID NO: 32100
  source 1..80: mol_type = other DNA

SEQ ID NO: 66336 - DNA, 80 bp, synthetic construct; identical to SEQ ID NO: 32101
  source 1..80: mol_type = other DNA

SEQ ID NO: 66337 - DNA, 80 bp, synthetic construct; identical to SEQ ID NO: 32102
  source 1..80: mol_type = other DNA

SEQ ID NO: 66338 - DNA, 80 bp, synthetic construct; identical to SEQ ID NO: 32103
  source 1..80: mol_type = other DNA

SEQ ID NO: 66339 - DNA, 80 bp, synthetic construct; identical to SEQ ID NO: 11915
  source 1..80: mol_type = other DNA

SEQ ID NO: 66340 - DNA, 80 bp, synthetic construct; identical to SEQ ID NO: 32105
  source 1..80: mol_type = other DNA

SEQ ID NO: 66341 - DNA, 80 bp, synthetic construct; identical to SEQ ID NO: 32106
  source 1..80: mol_type = other DNA

SEQ ID NO: 66342 - DNA, 80 bp, synthetic construct; identical to SEQ ID NO: 11916
  source 1..80: mol_type = other DNA

SEQ ID NO: 66343 - DNA, 80 bp, synthetic construct; identical to SEQ ID NO: 32108
  source 1..80: mol_type = other DNA

SEQ ID NO: 66344 - DNA, 80 bp, synthetic construct; identical to SEQ ID NO: 32109
  source 1..80: mol_type = other DNA

SEQ ID NO: 66345 - DNA, 80 bp, synthetic construct; identical to SEQ ID NO: 32110
  source 1..80: mol_type = other DNA

SEQ ID NO: 66346 - DNA, 80 bp, synthetic construct; identical to SEQ ID NO: 11917
  source 1..80: mol_type = other DNA

SEQ ID NO: 66347 - DNA, 80 bp, synthetic construct; identical to SEQ ID NO: 32112
  source 1..80: mol_type = other DNA

SEQ ID NO: 66348 - DNA, 80 bp, synthetic construct; identical to SEQ ID NO: 32113
  source 1..80: mol_type = other DNA

SEQ ID NO: 66349 - DNA, 80 bp, synthetic construct; identical to SEQ ID NO: 32114
  source 1..80: mol_type = other DNA

SEQ ID NO: 66350 - DNA, 80 bp, synthetic construct; identical to SEQ ID NO: 32115
  source 1..80: mol_type = other DNA

SEQ ID NO: 66351 - DNA, 80 bp, synthetic construct; identical to SEQ ID NO: 11918
  source 1..80: mol_type = other DNA

SEQ ID NO: 66352 - DNA, 80 bp, synthetic construct; identical to SEQ ID NO: 32117
  source 1..80: mol_type = other DNA

SEQ ID NO: 66353 - DNA, 80 bp, synthetic construct; identical to SEQ ID NO: 32118
  source 1..80: mol_type = other DNA

SEQ ID NO: 66354 - DNA, 80 bp, synthetic construct; identical to SEQ ID NO: 32119
  source 1..80: mol_type = other DNA

SEQ ID NO: 66355 - DNA, 80 bp, synthetic construct; identical to SEQ ID NO: 11919
  source 1..80: mol_type = other DNA

SEQ ID NO: 66356 - DNA, 80 bp, synthetic construct; identical to SEQ ID NO: 32121
  source 1..80: mol_type = other DNA

SEQ ID NO: 66357 - DNA, 80 bp, synthetic construct; identical to SEQ ID NO: 32122
  source 1..80: mol_type = other DNA

SEQ ID NO: 66358 - DNA, 80 bp, synthetic construct; identical to SEQ ID NO: 11983
  source 1..80: mol_type = other DNA

SEQ ID NO: 66359 - DNA, 80 bp, synthetic construct; identical to SEQ ID NO: 11920
  source 1..80: mol_type = other DNA

SEQ ID NO: 66360 - DNA, 80 bp, synthetic construct; identical to SEQ ID NO: 32125
  source 1..80: mol_type = other DNA

SEQ ID NO: 66361 - DNA, 80 bp, synthetic construct; identical to SEQ ID NO: 32126
  source 1..80: mol_type = other DNA

SEQ ID NO: 66362 - DNA, 80 bp, synthetic construct; identical to SEQ ID NO: 32127
  source 1..80: mol_type = other DNA

SEQ ID NO: 66363 - DNA, 80 bp, synthetic construct; identical to SEQ ID NO: 32128
  source 1..80: mol_type = other DNA

SEQ ID NO: 66364 - DNA, 80 bp, synthetic construct; identical to SEQ ID NO: 11921
  source 1..80: mol_type = other DNA

SEQ ID NO: 66365 - DNA, 80 bp, synthetic construct; identical to SEQ ID NO: 32130
  source 1..80: mol_type = other DNA

SEQ ID NO: 66366 - DNA, 80 bp, synthetic construct; identical to SEQ ID NO: 32131
  source 1..80: mol_type = other DNA

SEQ ID NO: 66367 - DNA, 80 bp, synthetic construct; identical to SEQ ID NO: 11922
  source 1..80: mol_type = other DNA

SEQ ID NO: 66368 - DNA, 80 bp, synthetic construct; identical to SEQ ID NO: 32133
  source 1..80: mol_type = other DNA

SEQ ID NO: 66369 - DNA, 80 bp, synthetic construct; identical to SEQ ID NO: 32134
  source 1..80: mol_type = other DNA

SEQ ID NO: 66370 - DNA, 80 bp, synthetic construct; identical to SEQ ID NO: 32135
  source 1..80: mol_type = other DNA

SEQ ID NO: 66371 - DNA, 80 bp, synthetic construct; identical to SEQ ID NO: 32136
  source 1..80: mol_type = other DNA

SEQ ID NO: 66372 - DNA, 80 bp, synthetic construct; identical to SEQ ID NO: 11923
  source 1..80: mol_type = other DNA

SEQ ID NO: 66373 - DNA, 80 bp, synthetic construct; identical to SEQ ID NO: 32138
  source 1..80: mol_type = other DNA

SEQ ID NO: 66374 - DNA, 80 bp, synthetic construct; identical to SEQ ID NO: 32139
  source 1..80: mol_type = other DNA

SEQ ID NO: 66375 - DNA, 80 bp, synthetic construct; identical to SEQ ID NO: 11924
  source 1..80: mol_type = other DNA

SEQ ID NO: 66376 - DNA, 80 bp, synthetic construct; identical to SEQ ID NO: 32142
  source 1..80: mol_type = other DNA

SEQ ID NO: 66377 - DNA, 80 bp, synthetic construct; identical to SEQ ID NO: 32144
  source 1..80: mol_type = other DNA

SEQ ID NO: 66378 - DNA, 80 bp, synthetic construct; identical to SEQ ID NO: 32146
  source 1..80: mol_type = other DNA

SEQ ID NO: 66379 - DNA, 80 bp, synthetic construct; identical to SEQ ID NO: 11926
  source 1..80: mol_type = other DNA

SEQ ID NO: 66380 - DNA, 80 bp, synthetic construct; identical to SEQ ID NO: 32150
  source 1..80: mol_type = other DNA

SEQ ID NO: 66381 - DNA, 80 bp, synthetic construct; identical to SEQ ID NO: 32151
  source 1..80: mol_type = other DNA

SEQ ID NO: 66382 - DNA, 80 bp, synthetic construct; identical to SEQ ID NO: 11927
  source 1..80: mol_type = other DNA

SEQ ID NO: 66383 - DNA, 80 bp, synthetic construct; identical to SEQ ID NO: 32155
  source 1..80: mol_type = other DNA

SEQ ID NO: 66384 - DNA, 80 bp, synthetic construct; identical to SEQ ID NO: 11928
  source 1..80: mol_type = other DNA

SEQ ID NO: 66385 - DNA, 80 bp, synthetic construct; identical to SEQ ID NO: 32158
  source 1..80: mol_type = other DNA

SEQ ID NO: 66386 - DNA, 80 bp, synthetic construct; identical to SEQ ID NO: 32159
  source 1..80: mol_type = other DNA

SEQ ID NO: 66387 - DNA, 80 bp, synthetic construct; identical to SEQ ID NO: 11929
  source 1..80: mol_type = other DNA

SEQ ID NO: 66388 - DNA, 80 bp, synthetic construct; identical to SEQ ID NO: 32161
  source 1..80: mol_type = other DNA

SEQ ID NO: 66389 - DNA, 80 bp, synthetic construct; identical to SEQ ID NO: 32162
  source 1..80: mol_type = other DNA

SEQ ID NO: 66390 - DNA, 80 bp, synthetic construct; identical to SEQ ID NO: 32163
  source 1..80: mol_type = other DNA

SEQ ID NO: 66391 - DNA, 80 bp, synthetic construct; identical to SEQ ID NO: 11930
  source 1..80: mol_type = other DNA

SEQ ID NO: 66392 - DNA, 80 bp, synthetic construct; identical to SEQ ID NO: 32165
  source 1..80: mol_type = other DNA

SEQ ID NO: 66393 - DNA, 80 bp, synthetic construct; identical to SEQ ID NO: 32166
  source 1..80: mol_type = other DNA

SEQ ID NO: 66394 - DNA, 80 bp, synthetic construct; identical to SEQ ID NO: 32167
  source 1..80: mol_type = other DNA

SEQ ID NO: 66395 - DNA, 80 bp, synthetic construct; identical to SEQ ID NO: 32168
  source 1..80: mol_type = other DNA

SEQ ID NO: 66396 - DNA, 80 bp, synthetic construct; identical to SEQ ID NO: 11931
  source 1..80: mol_type = other DNA

SEQ ID NO: 66397 - DNA, 80 bp, synthetic construct; identical to SEQ ID NO: 32170
  source 1..80: mol_type = other DNA

SEQ ID NO: 66398 - DNA, 80 bp, synthetic construct; identical to SEQ ID NO: 32171
  source 1..80: mol_type = other DNA

SEQ ID NO: 66399 - DNA, 80 bp, synthetic construct; identical to SEQ ID NO: 11932
  source 1..80: mol_type = other DNA

SEQ ID NO: 66400 - DNA, 80 bp, synthetic construct; identical to SEQ ID NO: 32173
  source 1..80: mol_type = other DNA

SEQ ID NO: 66401 - DNA, 80 bp, synthetic construct; identical to SEQ ID NO: 32174
  source 1..80: mol_type = other DNA

SEQ ID NO: 66402 - DNA, 80 bp, synthetic construct; identical to SEQ ID NO: 32175
  source 1..80: mol_type = other DNA

SEQ ID NO: 66403 - DNA, 80 bp, synthetic construct; identical to SEQ ID NO: 32176
  source 1..80: mol_type = other DNA

SEQ ID NO: 66404 - DNA, 80 bp, synthetic construct; identical to SEQ ID NO: 11933
  source 1..80: mol_type = other DNA

SEQ ID NO: 66405 - DNA, 80 bp, synthetic construct; identical to SEQ ID NO: 32178
  source 1..80: mol_type = other DNA

SEQ ID NO: 66406 - DNA, 80 bp, synthetic construct; identical to SEQ ID NO: 32179
  source 1..80: mol_type = other DNA

SEQ ID NO: 66407 - DNA, 80 bp, synthetic construct; identical to SEQ ID NO: 32180
  source 1..80: mol_type = other DNA

SEQ ID NO: 66408 - DNA, 80 bp, synthetic construct; identical to SEQ ID NO: 32181
  source 1..80: mol_type = other DNA

SEQ ID NO: 66409 - DNA, 80 bp, synthetic construct; identical to SEQ ID NO: 11934
  source 1..80: mol_type = other DNA

SEQ ID NO: 66410 - DNA, 80 bp, synthetic construct; identical to SEQ ID NO: 32183
  source 1..80: mol_type = other DNA

SEQ ID NO: 66411 - DNA, 80 bp, synthetic construct; identical to SEQ ID NO: 32184
  source 1..80: mol_type = other DNA

SEQ ID NO: 66412 - DNA, 80 bp, synthetic construct; identical to SEQ ID NO: 11935
  source 1..80: mol_type = other DNA

SEQ ID NO: 66413 - DNA, 80 bp, synthetic construct; identical to SEQ ID NO: 32187
  source 1..80: mol_type = other DNA

SEQ ID NO: 66414 - DNA, 80 bp, synthetic construct; identical to SEQ ID NO: 32188
  source 1..80: mol_type = other DNA

SEQ ID NO: 66415 - DNA, 80 bp, synthetic construct; identical to SEQ ID NO: 32189
  source 1..80: mol_type = other DNA

SEQ ID NO: 66416 - DNA, 80 bp, synthetic construct; identical to SEQ ID NO: 32190
  source 1..80: mol_type = other DNA

SEQ ID NO: 66417 - DNA, 80 bp, synthetic construct; identical to SEQ ID NO: 32191
  source 1..80: mol_type = other DNA

SEQ ID NO: 66418 - DNA, 80 bp, synthetic construct; identical to SEQ ID NO: 32192
  source 1..80: mol_type = other DNA

SEQ ID NO: 66419 - DNA, 80 bp, synthetic construct; identical to SEQ ID NO: 11936
  source 1..80: mol_type = other DNA

SEQ ID NO: 66420 - DNA, 80 bp, synthetic construct; identical to SEQ ID NO: 32194
  source 1..80: mol_type = other DNA

SEQ ID NO: 66421 - DNA, 80 bp, synthetic construct; identical to SEQ ID NO: 11937
  source 1..80: mol_type = other DNA

SEQ ID NO: 66422 - DNA, 80 bp, synthetic construct; identical to SEQ ID NO: 32196
  source 1..80: mol_type = other DNA

SEQ ID NO: 66423 - DNA, 80 bp, synthetic construct; identical to SEQ ID NO: 32197
  source 1..80: mol_type = other DNA

SEQ ID NO: 66424 - DNA, 80 bp, synthetic construct; identical to SEQ ID NO: 11911
  source 1..80: mol_type = other DNA

SEQ ID NO: 66425 - DNA, 80 bp, synthetic construct; identical to SEQ ID NO: 11938
  source 1..80: mol_type = other DNA

SEQ ID NO: 66426 - DNA, 80 bp, synthetic construct; identical to SEQ ID NO: 32200
  source 1..80: mol_type = other DNA

SEQ ID NO: 66427 - DNA, 80 bp, synthetic construct; identical to SEQ ID NO: 32201
  source 1..80: mol_type = other DNA

SEQ ID NO: 66428 - DNA, 80 bp, synthetic construct; identical to SEQ ID NO: 11939
  source 1..80: mol_type = other DNA

SEQ ID NO: 66429 - DNA, 80 bp, synthetic construct; identical to SEQ ID NO: 32203
  source 1..80: mol_type = other DNA

SEQ ID NO: 66430 - DNA, 80 bp, synthetic construct; identical to SEQ ID NO: 32204
  source 1..80: mol_type = other DNA

SEQ ID NO: 66431 - DNA, 80 bp, synthetic construct; identical to SEQ ID NO: 32205
  source 1..80: mol_type = other DNA

SEQ ID NO: 66432 - DNA, 80 bp, synthetic construct; identical to SEQ ID NO: 11940
  source 1..80: mol_type = other DNA

SEQ ID NO: 66433 - DNA, 80 bp, synthetic construct; identical to SEQ ID NO: 32207
  source 1..80: mol_type = other DNA

SEQ ID NO: 66434 - DNA, 80 bp, synthetic construct; identical to SEQ ID NO: 32208
  source 1..80: mol_type = other DNA

SEQ ID NO: 66435 - DNA, 80 bp, synthetic construct; identical to SEQ ID NO: 32209
  source 1..80: mol_type = other DNA

SEQ ID NO: 66436 - DNA, 80 bp, synthetic construct; identical to SEQ ID NO: 32210
  source 1..80: mol_type = other DNA

SEQ ID NO: 66437 - DNA, 80 bp, synthetic construct; identical to SEQ ID NO: 11941
  source 1..80: mol_type = other DNA

SEQ ID NO: 66438 - DNA, 80 bp, synthetic construct; identical to SEQ ID NO: 32212
  source 1..80: mol_type = other DNA

SEQ ID NO: 66439 - DNA, 80 bp, synthetic construct; identical to SEQ ID NO: 32213
  source 1..80: mol_type = other DNA

SEQ ID NO: 66440 - DNA, 80 bp, synthetic construct; identical to SEQ ID NO: 11942
  source 1..80: mol_type = other DNA

SEQ ID NO: 66441 - DNA, 80 bp, synthetic construct; identical to SEQ ID NO: 32215
  source 1..80: mol_type = other DNA

SEQ ID NO: 66442 - DNA, 80 bp, synthetic construct; identical to SEQ ID NO: 11943
  source 1..80: mol_type = other DNA

SEQ ID NO: 66443 - DNA, 80 bp, synthetic construct; identical to SEQ ID NO: 32218
  source 1..80: mol_type = other DNA

SEQ ID NO: 66444 - DNA, 80 bp, synthetic construct; identical to SEQ ID NO: 32220
  source 1..80: mol_type = other DNA

SEQ ID NO: 66445 - DNA, 80 bp, synthetic construct; identical to SEQ ID NO: 11944
  source 1..80: mol_type = other DNA

SEQ ID NO: 66446 - DNA, 80 bp, synthetic construct; identical to SEQ ID NO: 32223
  source 1..80: mol_type = other DNA

SEQ ID NO: 66447 - DNA, 80 bp, synthetic construct; identical to SEQ ID NO: 11945
  source 1..80: mol_type = other DNA

SEQ ID NO: 66448 - DNA, 80 bp, synthetic construct; identical to SEQ ID NO: 32227
  source 1..80: mol_type = other DNA

SEQ ID NO: 66449 - DNA, 80 bp, synthetic construct; identical to SEQ ID NO: 32229
  source 1..80: mol_type = other DNA

SEQ ID NO: 66450 - DNA, 80 bp, synthetic construct; identical to SEQ ID NO: 32231
  source 1..80: mol_type = other DNA

SEQ ID NO: 66451 - DNA, 80 bp, synthetic construct; identical to SEQ ID NO: 32233
  source 1..80: mol_type = other DNA

SEQ ID NO: 66452 - DNA, 80 bp, synthetic construct; identical to SEQ ID NO: 32235
  source 1..80: mol_type = other DNA

SEQ ID NO: 66453 - DNA, 80 bp, synthetic construct; identical to SEQ ID NO: 11948
  source 1..80: mol_type = other DNA

SEQ ID NO: 66454 - DNA, 80 bp, synthetic construct; identical to SEQ ID NO: 32239
  source 1..80: mol_type = other DNA

SEQ ID NO: 66455 - DNA, 80 bp, synthetic construct; identical to SEQ ID NO: 32240
  source 1..80: mol_type = other DNA

SEQ ID NO: 66456 - DNA, 80 bp, synthetic construct; identical to SEQ ID NO: 32241
  source 1..80: mol_type = other DNA

SEQ ID NO: 66457 - DNA, 80 bp, synthetic construct; identical to SEQ ID NO: 11949
  source 1..80: mol_type = other DNA

SEQ ID NO: 66458 - DNA, 80 bp, synthetic construct; identical to SEQ ID NO: 32243
  source 1..80: mol_type = other DNA

SEQ ID NO: 66459 - DNA, 80 bp, synthetic construct; identical to SEQ ID NO: 32244
  source 1..80: mol_type = other DNA

SEQ ID NO: 66460 - DNA, 80 bp, synthetic construct; identical to SEQ ID NO: 11950
  source 1..80: mol_type = other DNA

SEQ ID NO: 66461 - DNA, 80 bp, synthetic construct; identical to SEQ ID NO: 32246
  source 1..80: mol_type = other DNA

SEQ ID NO: 66462 - DNA, 80 bp, synthetic construct; identical to SEQ ID NO: 32247
  source 1..80: mol_type = other DNA

SEQ ID NO: 66463 - DNA, 80 bp, synthetic construct; identical to SEQ ID NO: 32248
  source 1..80: mol_type = other DNA

SEQ ID NO: 66464 - DNA, 80 bp, synthetic construct; identical to SEQ ID NO: 32249
  source 1..80: mol_type = other DNA

SEQ ID NO: 66465 - DNA, 80 bp, synthetic construct; identical to SEQ ID NO: 11951
  source 1..80: mol_type = other DNA

SEQ ID NO: 66466 - DNA, 80 bp, synthetic construct; identical to SEQ ID NO: 32251
  source 1..80: mol_type = other DNA

SEQ ID NO: 66467 - DNA, 80 bp, synthetic construct; identical to SEQ ID NO: 32252
  source 1..80: mol_type = other DNA

SEQ ID NO: 66468 - DNA, 80 bp, synthetic construct; identical to SEQ ID NO: 11952
  source 1..80: mol_type = other DNA

SEQ ID NO: 66469 - DNA, 80 bp, synthetic construct; identical to SEQ ID NO: 32254
  source 1..80: mol_type = other DNA

SEQ ID NO: 66470 - DNA, 80 bp, synthetic construct; identical to SEQ ID NO: 32255
  source 1..80: mol_type = other DNA

SEQ ID NO: 66471 - DNA, 80 bp, synthetic construct; identical to SEQ ID NO: 32256
  source 1..80: mol_type = other DNA

SEQ ID NO: 66472 - DNA, 80 bp, synthetic construct; identical to SEQ ID NO: 32257
  source 1..80: mol_type = other DNA

SEQ ID NO: 66473 - DNA, 80 bp, synthetic construct; identical to SEQ ID NO: 11953
  source 1..80: mol_type = other DNA

SEQ ID NO: 66474 - DNA, 80 bp, synthetic construct; identical to SEQ ID NO: 32259
  source 1..80: mol_type = other DNA

SEQ ID NO: 66475 - DNA, 80 bp, synthetic construct; identical to SEQ ID NO: 32260
  source 1..80: mol_type = other DNA

SEQ ID NO: 66476 - DNA, 80 bp, synthetic construct; identical to SEQ ID NO: 11954
  source 1..80: mol_type = other DNA

SEQ ID NO: 66477 - DNA, 80 bp, synthetic construct; identical to SEQ ID NO: 32262
  source 1..80: mol_type = other DNA

SEQ ID NO: 66478 - DNA, 80 bp, synthetic construct; identical to SEQ ID NO: 32263
  source 1..80: mol_type = other DNA

SEQ ID NO: 66479 - DNA, 80 bp, synthetic construct; identical to SEQ ID NO: 32264
  source 1..80: mol_type = other DNA

SEQ ID NO: 66480 - DNA, 80 bp, synthetic construct; identical to SEQ ID NO: 32265
  source 1..80: mol_type = other DNA

SEQ ID NO: 66481 - DNA, 80 bp, synthetic construct; identical to SEQ ID NO: 11955
  source 1..80: mol_type = other DNA

SEQ ID NO: 66482 - DNA, 80 bp, synthetic construct; identical to SEQ ID NO: 32267
  source 1..80: mol_type = other DNA

SEQ ID NO: 66483 - DNA, 80 bp, synthetic construct; identical to SEQ ID NO: 32268
  source 1..80: mol_type = other DNA

SEQ ID NO: 66484 - DNA, 80 bp, synthetic construct; identical to SEQ ID NO: 32269
  source 1..80: mol_type = other DNA

SEQ ID NO: 66485 - DNA, 80 bp, synthetic construct; identical to SEQ ID NO: 11956
  source 1..80: mol_type = other DNA

SEQ ID NO: 66486 - DNA, 80 bp, synthetic construct; identical to SEQ ID NO: 32271
  source 1..80: mol_type = other DNA

SEQ ID NO: 66487 - DNA, 80 bp, synthetic construct; identical to SEQ ID NO: 32272
  source 1..80: mol_type = other DNA

SEQ ID NO: 66488 - DNA, 80 bp, synthetic construct; identical to SEQ ID NO: 11957
  source 1..80: mol_type = other DNA

SEQ ID NO: 66489 - DNA, 80 bp, synthetic construct; identical to SEQ ID NO: 32274
  source 1..80: mol_type = other DNA

SEQ ID NO: 66490 - DNA, 80 bp, synthetic construct; identical to SEQ ID NO: 32275
  source 1..80: mol_type = other DNA

SEQ ID NO: 66491 - DNA, 80 bp, synthetic construct; identical to SEQ ID NO: 32276
  source 1..80: mol_type = other DNA

SEQ ID NO: 66492 - DNA, 80 bp, synthetic construct; identical to SEQ ID NO: 11958
  source 1..80: mol_type = other DNA

SEQ ID NO: 66493 - DNA, 80 bp, synthetic construct; identical to SEQ ID NO: 32278
  source 1..80: mol_type = other DNA

SEQ ID NO: 66494 - DNA, 80 bp, synthetic construct; identical to SEQ ID NO: 32279
  source 1..80: mol_type = other DNA

SEQ ID NO: 66495 - DNA, 80 bp, synthetic construct; identical to SEQ ID NO: 32280
  source 1..80: mol_type = other DNA

SEQ ID NO: 66496 - DNA, 80 bp, synthetic construct; identical to SEQ ID NO: 32281
  source 1..80: mol_type = other DNA

SEQ ID NO: 66497 - DNA, 80 bp, synthetic construct; identical to SEQ ID NO: 11959
  source 1..80: mol_type = other DNA

SEQ ID NO: 66498 - DNA, 80 bp, synthetic construct; identical to SEQ ID NO: 32283
  source 1..80: mol_type = other DNA

SEQ ID NO: 66499 - DNA, 80 bp, synthetic construct; identical to SEQ ID NO: 32284
  source 1..80: mol_type = other DNA

SEQ ID NO: 66500 - DNA, 80 bp, synthetic construct; identical to SEQ ID NO: 32285
  source 1..80: mol_type = other DNA

SEQ ID NO: 66501 - DNA, 80 bp, synthetic construct; identical to SEQ ID NO: 11960
  source 1..80: mol_type = other DNA

SEQ ID NO: 66502 - DNA, 80 bp, synthetic construct; identical to SEQ ID NO: 32287
  source 1..80: mol_type = other DNA

SEQ ID NO: 66503 - DNA, 80 bp, synthetic construct; identical to SEQ ID NO: 32288
  source 1..80: mol_type = other DNA

SEQ ID NO: 66504 - DNA, 80 bp, synthetic construct; identical to SEQ ID NO: 32289
  source 1..80: mol_type = other DNA

SEQ ID NO: 66505 - DNA, 80 bp, synthetic construct; identical to SEQ ID NO: 11961
  source 1..80: mol_type = other DNA

SEQ ID NO: 66506 - DNA, 80 bp, synthetic construct; identical to SEQ ID NO: 32291
  source 1..80: mol_type = other DNA

SEQ ID NO: 66507 - DNA, 80 bp, synthetic construct; identical to SEQ ID NO: 32292
  source 1..80: mol_type = other DNA

SEQ ID NO: 66508 - DNA, 80 bp, synthetic construct; identical to SEQ ID NO: 11962
  source 1..80: mol_type = other DNA

SEQ ID NO: 66509 - DNA, 80 bp, synthetic construct; identical to SEQ ID NO: 32295
  source 1..80: mol_type = other DNA

SEQ ID NO: 66510 - DNA, 80 bp, synthetic construct; identical to SEQ ID NO: 32296
  source 1..80: mol_type = other DNA

SEQ ID NO: 66511 - DNA, 80 bp, synthetic construct; identical to SEQ ID NO: 11963
  source 1..80: mol_type = other DNA

SEQ ID NO: 66512 - DNA, 80 bp, synthetic construct; identical to SEQ ID NO: 32298
  source 1..80: mol_type = other DNA

SEQ ID NO: 66513 - DNA, 80 bp, synthetic construct; identical to SEQ ID NO: 32299
  source 1..80: mol_type = other DNA

SEQ ID NO: 66514 - DNA, 80 bp, synthetic construct; identical to SEQ ID NO: 32300
  source 1..80: mol_type = other DNA

SEQ ID NO: 66515 - DNA, 80 bp, synthetic construct; identical to SEQ ID NO: 11964
  source 1..80: mol_type = other DNA

SEQ ID NO: 66516 - DNA, 80 bp, synthetic construct; identical to SEQ ID NO: 32302
  source 1..80: mol_type = other DNA

SEQ ID NO: 66517 - DNA, 80 bp, synthetic construct; identical to SEQ ID NO: 32303
  source 1..80: mol_type = other DNA

SEQ ID NO: 66518 - DNA, 80 bp, synthetic construct; identical to SEQ ID NO: 32304
  source 1..80: mol_type = other DNA

SEQ ID NO: 66519 - DNA, 80 bp, synthetic construct; identical to SEQ ID NO: 32305
  source 1..80: mol_type = other DNA

SEQ ID NO: 66520 - DNA, 80 bp, synthetic construct; identical to SEQ ID NO: 11965
  source 1..80: mol_type = other DNA

SEQ ID NO: 66521 - DNA, 80 bp, synthetic construct; identical to SEQ ID NO: 32307
  source 1..80: mol_type = other DNA

SEQ ID NO: 66522 - DNA, 80 bp, synthetic construct; identical to SEQ ID NO: 32308
  source 1..80: mol_type = other DNA

SEQ ID NO: 66523 - DNA, 80 bp, synthetic construct; identical to SEQ ID NO: 32309
  source 1..80: mol_type = other DNA

SEQ ID NO: 66524 - DNA, 80 bp, synthetic construct; identical to SEQ ID NO: 11966
  source 1..80: mol_type = other DNA

SEQ ID NO: 66525 - DNA, 80 bp, synthetic construct; identical to SEQ ID NO: 32311
  source 1..80: mol_type = other DNA

SEQ ID NO: 66526 - DNA, 80 bp, synthetic construct; identical to SEQ ID NO: 32312
  source 1..80: mol_type = other DNA

SEQ ID NO: 66527 - DNA, 80 bp, synthetic construct; identical to SEQ ID NO: 11967
  source 1..80: mol_type = other DNA

SEQ ID NO: 66528 - DNA, 80 bp, synthetic construct; identical to SEQ ID NO: 32314
  source 1..80: mol_type = other DNA

SEQ ID NO: 66529 - DNA, 80 bp, synthetic construct; identical to SEQ ID NO: 32315
  source 1..80: mol_type = other DNA

SEQ ID NO: 66530 - DNA, 80 bp, synthetic construct; identical to SEQ ID NO: 32316
  source 1..80: mol_type = other DNA

SEQ ID NO: 66531 - DNA, 80 bp, synthetic construct; identical to SEQ ID NO: 11968
  source 1..80: mol_type = other DNA

SEQ ID NO: 66532 - DNA, 80 bp, synthetic construct; identical to SEQ ID NO: 32318
  source 1..80: mol_type = other DNA

SEQ ID NO: 66533 - DNA, 80 bp, synthetic construct; identical to SEQ ID NO: 32319
  source 1..80: mol_type = other DNA

SEQ ID NO: 66534 - DNA, 80 bp, synthetic construct; identical to SEQ ID NO: 32320
  source 1..80: mol_type = other DNA

SEQ ID NO: 66535 - DNA, 80 bp, synthetic construct; identical to SEQ ID NO: 11969
  source 1..80: mol_type = other DNA

SEQ ID NO: 66536 - DNA, 80 bp, synthetic construct; identical to SEQ ID NO: 32322
  source 1..80: mol_type = other DNA

SEQ ID NO: 66537 - DNA, 80 bp, synthetic construct; identical to SEQ ID NO: 32323
  source 1..80: mol_type = other DNA

SEQ ID NO: 66538 - DNA, 80 bp, synthetic construct; identical to SEQ ID NO: 32324
  source 1..80: mol_type = other DNA

SEQ ID NO: 66539 - DNA, 80 bp, synthetic construct; identical to SEQ ID NO: 11970
  source 1..80: mol_type = other DNA

SEQ ID NO: 66540 - DNA, 80 bp, synthetic construct; identical to SEQ ID NO: 32326
  source 1..80: mol_type = other DNA

SEQ ID NO: 66541 - DNA, 80 bp, synthetic construct; identical to SEQ ID NO: 32327
  source 1..80: mol_type = other DNA

SEQ ID NO: 66542 - DNA, 80 bp, synthetic construct; identical to SEQ ID NO: 11971
  source 1..80: mol_type = other DNA

SEQ ID NO: 66543 - DNA, 80 bp, synthetic construct; identical to SEQ ID NO: 32329
  source 1..80: mol_type = other DNA

SEQ ID NO: 66544 - DNA, 80 bp, synthetic construct; identical to SEQ ID NO: 32330
  source 1..80: mol_type = other DNA

SEQ ID NO: 66545 - DNA, 80 bp, synthetic construct; identical to SEQ ID NO: 32331
  source 1..80: mol_type = other DNA

SEQ ID NO: 66546 - DNA, 80 bp, synthetic construct; identical to SEQ ID NO: 32332
  source 1..80: mol_type = other DNA

SEQ ID NO: 66547 - DNA, 80 bp, synthetic construct; identical to SEQ ID NO: 11972
  source 1..80: mol_type = other DNA

SEQ ID NO: 66548 - DNA, 80 bp, synthetic construct; identical to SEQ ID NO: 32334
  source 1..80: mol_type = other DNA

SEQ ID NO: 66549 - DNA, 80 bp, synthetic construct; identical to SEQ ID NO: 32335
  source 1..80: mol_type = other DNA

SEQ ID NO: 66550 - DNA, 80 bp, synthetic construct; identical to SEQ ID NO: 11973
  source 1..80: mol_type = other DNA

SEQ ID NO: 66551 - DNA, 80 bp, synthetic construct; identical to SEQ ID NO: 32337
  source 1..80: mol_type = other DNA

SEQ ID NO: 66552 - DNA, 80 bp, synthetic construct; identical to SEQ ID NO: 32338
  source 1..80: mol_type = other DNA

SEQ ID NO: 66553 - DNA, 80 bp, synthetic construct; identical to SEQ ID NO: 32339
  source 1..80: mol_type = other DNA

SEQ ID NO: 66554 - DNA, 80 bp, synthetic construct; identical to SEQ ID NO: 32340
  source 1..80: mol_type = other DNA

SEQ ID NO: 66555 - DNA, 80 bp, synthetic construct; identical to SEQ ID NO: 11974
  source 1..80: mol_type = other DNA

SEQ ID NO: 66556 - DNA, 80 bp, synthetic construct; identical to SEQ ID NO: 32342
  source 1..80: mol_type = other DNA

SEQ ID NO: 66557 - DNA, 80 bp, synthetic construct; identical to SEQ ID NO: 32343
  source 1..80: mol_type = other DNA

SEQ ID NO: 66558 - DNA, 80 bp, synthetic construct; identical to SEQ ID NO: 11975
  source 1..80: mol_type = other DNA

SEQ ID NO: 66559 - DNA, 80 bp, synthetic construct; identical to SEQ ID NO: 32345
  source 1..80: mol_type = other DNA

SEQ ID NO: 66560 - DNA, 80 bp, synthetic construct; identical to SEQ ID NO: 32346
  source 1..80: mol_type = other DNA

SEQ ID NO: 66561 - DNA, 80 bp, synthetic construct; identical to SEQ ID NO: 32347
  source 1..80: mol_type = other DNA

SEQ ID NO: 66562 - DNA, 80 bp, synthetic construct; identical to SEQ ID NO: 11976
  source 1..80: mol_type = other DNA

SEQ ID NO: 66563 - DNA, 80 bp, synthetic construct; identical to SEQ ID NO: 32349
  source 1..80: mol_type = other DNA

SEQ ID NO: 66564 - DNA, 80 bp, synthetic construct; identical to SEQ ID NO: 32350
  source 1..80: mol_type = other DNA

SEQ ID NO: 66565 - DNA, 80 bp, synthetic construct; identical to SEQ ID NO: 32351
  source 1..80: mol_type = other DNA

SEQ ID NO: 66566 - DNA, 80 bp, synthetic construct; identical to SEQ ID NO: 11977
  source 1..80: mol_type = other DNA

SEQ ID NO: 66567 - DNA, 80 bp, synthetic construct; identical to SEQ ID NO: 32353
  source 1..80: mol_type = other DNA

SEQ ID NO: 66568 - DNA, 80 bp, synthetic construct; identical to SEQ ID NO: 32354
  source 1..80: mol_type = other DNA

SEQ ID NO: 66569 - DNA, 80 bp, synthetic construct; identical to SEQ ID NO: 32356
  source 1..80: mol_type = other DNA

SEQ ID NO: 66570 - DNA, 80 bp, synthetic construct; identical to SEQ ID NO: 11978
  source 1..80: mol_type = other DNA

SEQ ID NO: 66571 - DNA, 80 bp, synthetic construct; identical to SEQ ID NO: 32358
  source 1..80: mol_type = other DNA

SEQ ID NO: 66572 - DNA, 80 bp, synthetic construct; identical to SEQ ID NO: 32359
  source 1..80: mol_type = other DNA

SEQ ID NO: 66573 - DNA, 80 bp, synthetic construct; identical to SEQ ID NO: 32360
  source 1..80: mol_type = other DNA

SEQ ID NO: 66574 - DNA, 80 bp, synthetic construct; identical to SEQ ID NO: 11979
  source 1..80: mol_type = other DNA

SEQ ID NO: 66575 - DNA, 80 bp, synthetic construct; identical to SEQ ID NO: 32362
  source 1..80: mol_type = other DNA

SEQ ID NO: 66576 - DNA, 80 bp, synthetic construct; identical to SEQ ID NO: 32363
  source 1..80: mol_type = other DNA

SEQ ID NO: 66577 - DNA, 80 bp, synthetic construct; identical to SEQ ID NO: 32364
  source 1..80: mol_type = other DNA

SEQ ID NO: 66578 - DNA, 80 bp, synthetic construct; identical to SEQ ID NO: 11980
  source 1..80: mol_type = other DNA

SEQ ID NO: 66579 - DNA, 80 bp, synthetic construct; identical to SEQ ID NO: 32366
  source 1..80: mol_type = other DNA

SEQ ID NO: 66580 - DNA, 80 bp, synthetic construct; identical to SEQ ID NO: 32367
  source 1..80: mol_type = other DNA

SEQ ID NO: 66581 - DNA, 80 bp, synthetic construct; identical to SEQ ID NO: 11981
  source 1..80: mol_type = other DNA

SEQ ID NO: 66582 - DNA, 80 bp, synthetic construct; identical to SEQ ID NO: 32369
  source 1..80: mol_type = other DNA

SEQ ID NO: 66583 - DNA, 80 bp, synthetic construct; identical to SEQ ID NO: 32370
  source 1..80: mol_type = other DNA

SEQ ID NO: 66584 - DNA, 80 bp, synthetic construct; identical to SEQ ID NO: 32371
  source 1..80: mol_type = other DNA

SEQ ID NO: 66585 - DNA, 80 bp, synthetic construct; identical to SEQ ID NO: 32372
  source 1..80: mol_type = other DNA

SEQ ID NO: 66586 - DNA, 80 bp, synthetic construct; identical to SEQ ID NO: 11982
  source 1..80: mol_type = other DNA

SEQ ID NO: 66587 - DNA, 80 bp, synthetic construct; identical to SEQ ID NO: 32374
  source 1..80: mol_type = other DNA

SEQ ID NO: 66588 - DNA, 80 bp, synthetic construct; identical to SEQ ID NO: 32375
  source 1..80: mol_type = other DNA

SEQ ID NO: 66589 - DNA, 80 bp, synthetic construct; identical to SEQ ID NO: 32376
  source 1..80: mol_type = other DNA

SEQ ID NO: 66590 - DNA, 80 bp, synthetic construct; identical to SEQ ID NO: 32377
  source 1..80: mol_type = other DNA

SEQ ID NO: 66591 - DNA, 80 bp, synthetic construct; identical to SEQ ID NO: 32378
  source 1..80: mol_type = other DNA

SEQ ID NO: 66592 - DNA, 80 bp, synthetic construct; identical to SEQ ID NO: 32379
  source 1..80: mol_type = other DNA

SEQ ID NO: 66593 - DNA, 80 bp, synthetic construct; identical to SEQ ID NO: 32380
  source 1..80: mol_type = other DNA

SEQ ID NO: 66594 - DNA, 80 bp, synthetic construct; identical to SEQ ID NO: 11984
  source 1..80: mol_type = other DNA

SEQ ID NO: 66595 - DNA, 80 bp, synthetic construct; identical to SEQ ID NO: 32382
  source 1..80: mol_type = other DNA

SEQ ID NO: 66596 - DNA, 80 bp, synthetic construct; identical to SEQ ID NO: 32383
  source 1..80: mol_type = other DNA

SEQ ID NO: 66597 - DNA, 80 bp, synthetic construct; identical to SEQ ID NO: 11985
  source 1..80: mol_type = other DNA

SEQ ID NO: 66598 - DNA, 80 bp, synthetic construct; identical to SEQ ID NO: 32386
  source 1..80: mol_type = other DNA

SEQ ID NO: 66599 - DNA, 80 bp, synthetic construct; identical to SEQ ID NO: 32387
  source 1..80: mol_type = other DNA

SEQ ID NO: 66600 - DNA, 80 bp, synthetic construct; identical to SEQ ID NO: 32388
  source 1..80: mol_type = other DNA

SEQ ID NO: 66601 - DNA, 80 bp, synthetic construct; identical to SEQ ID NO: 11986
  source 1..80: mol_type = other DNA

SEQ ID NO: 66602 - DNA, 80 bp, synthetic construct; identical to SEQ ID NO: 32390
  source 1..80: mol_type = other DNA

SEQ ID NO: 66603 - DNA, 80 bp, synthetic construct; identical to SEQ ID NO: 32391
  source 1..80: mol_type = other DNA

SEQ ID NO: 66604 - DNA, 80 bp, synthetic construct; identical to SEQ ID NO: 32392
  source 1..80: mol_type = other DNA

SEQ ID NO: 66605 - DNA, 80 bp, synthetic construct; identical to SEQ ID NO: 32393
  source 1..80: mol_type = other DNA

SEQ ID NO: 66606 - DNA, 80 bp, synthetic construct; identical to SEQ ID NO: 11987
  source 1..80: mol_type = other DNA

SEQ ID NO: 66607 - DNA, 80 bp, synthetic construct; identical to SEQ ID NO: 32395
  source 1..80: mol_type = other DNA

SEQ ID NO: 66608 - DNA, 80 bp, synthetic construct; identical to SEQ ID NO: 32396
  source 1..80: mol_type = other DNA

SEQ ID NO: 66609 - DNA, 80 bp, synthetic construct; identical to SEQ ID NO: 11988
  source 1..80: mol_type = other DNA

SEQ ID NO: 66610 - DNA, 80 bp, synthetic construct; identical to SEQ ID NO: 32398
  source 1..80: mol_type = other DNA

SEQ ID NO: 66611 - DNA, 80 bp, synthetic construct; identical to SEQ ID NO: 32399
  source 1..80: mol_type = other DNA

SEQ ID NO: 66612 - DNA, 80 bp, synthetic construct; identical to SEQ ID NO: 32400
  source 1..80: mol_type = other DNA

SEQ ID NO: 66613 - DNA, 80 bp, synthetic construct; identical to SEQ ID NO: 11989
  source 1..80: mol_type = other DNA

SEQ ID NO: 66614 - DNA, 80 bp, synthetic construct; identical to SEQ ID NO: 32402
  source 1..80: mol_type = other DNA

SEQ ID NO: 66615 - DNA, 80 bp, synthetic construct; identical to SEQ ID NO: 32403
  source 1..80: mol_type = other DNA

SEQ ID NO: 66616 - DNA, 80 bp, synthetic construct; identical to SEQ ID NO: 32404
  source 1..80: mol_type = other DNA

SEQ ID NO: 66617 - DNA, 80 bp, synthetic construct; identical to SEQ ID NO: 32405
  source 1..80: mol_type = other DNA

SEQ ID NO: 66618 - DNA, 80 bp, synthetic construct; identical to SEQ ID NO: 11990
  source 1..80: mol_type = other DNA

SEQ ID NO: 66619 - DNA, 80 bp, synthetic construct; identical to SEQ ID NO: 32407
  source 1..80: mol_type = other DNA

SEQ ID NO: 66620 - DNA, 80 bp, synthetic construct; identical to SEQ ID NO: 32408
  source 1..80: mol_type = other DNA

SEQ ID NO: 66621 - DNA, 80 bp, synthetic construct; identical to SEQ ID NO: 32409
  source 1..80: mol_type = other DNA

SEQ ID NO: 66622 - DNA, 80 bp, synthetic construct; identical to SEQ ID NO: 11991
  source 1..80: mol_type = other DNA

SEQ ID NO: 66623 - DNA, 80 bp, synthetic construct; identical to SEQ ID NO: 32412
  source 1..80: mol_type = other DNA

SEQ ID NO: 66624 - DNA, 80 bp, synthetic construct; identical to SEQ ID NO: 32413
  source 1..80: mol_type = other DNA

SEQ ID NO: 66625 - DNA, 80 bp, synthetic construct; identical to SEQ ID NO: 11992
  source 1..80: mol_type = other DNA

SEQ ID NO: 66626 - DNA, 80 bp, synthetic construct; identical to SEQ ID NO: 32415
  source 1..80: mol_type = other DNA

SEQ ID NO: 66627 - DNA, 80 bp, synthetic construct; identical to SEQ ID NO: 32416
  source 1..80: mol_type = other DNA

SEQ ID NO: 66628 - DNA, 80 bp, synthetic construct; identical to SEQ ID NO: 11993
  source 1..80: mol_type = other DNA

SEQ ID NO: 66629 - DNA, 80 bp, synthetic construct; identical to SEQ ID NO: 32419
  source 1..80: mol_type = other DNA

SEQ ID NO: 66630 - DNA, 80 bp, synthetic construct; identical to SEQ ID NO: 11994
  source 1..80: mol_type = other DNA

SEQ ID NO: 66631 - DNA, 80 bp, synthetic construct; identical to SEQ ID NO: 32423
  source 1..80: mol_type = other DNA

SEQ ID NO: 66632 - DNA, 80 bp, synthetic construct; identical to SEQ ID NO: 11995
  source 1..80: mol_type = other DNA

SEQ ID NO: 66633 - DNA, 80 bp, synthetic construct; identical to SEQ ID NO: 32426
  source 1..80: mol_type = other DNA

SEQ ID NO: 66634 - DNA, 80 bp, synthetic construct; identical to SEQ ID NO: 32427
  source 1..80: mol_type = other DNA

SEQ ID NO: 66635 - DNA, 80 bp, synthetic construct; identical to SEQ ID NO: 32428
  source 1..80: mol_type = other DNA

SEQ ID NO: 66636 - DNA, 80 bp, synthetic construct; identical to SEQ ID NO: 11996
  source 1..80: mol_type = other DNA

SEQ ID NO: 66637 - DNA, 80 bp, synthetic construct; identical to SEQ ID NO: 32430
  source 1..80: mol_type = other DNA

SEQ ID NO: 66638 - DNA, 80 bp, synthetic construct; identical to SEQ ID NO: 32431
  source 1..80: mol_type = other DNA

SEQ ID NO: 66639 - DNA, 80 bp, synthetic construct; identical to SEQ ID NO: 32432
  source 1..80: mol_type = other DNA

SEQ ID NO: 66640 - DNA, 80 bp, synthetic construct; identical to SEQ ID NO: 11997
  source 1..80: mol_type = other DNA

SEQ ID NO: 66641 - DNA, 80 bp, synthetic construct; identical to SEQ ID NO: 32434
  source 1..80: mol_type = other DNA

SEQ ID NO: 66642 - DNA, 80 bp, synthetic construct; identical to SEQ ID NO: 11998
  source 1..80: mol_type = other DNA

SEQ ID NO: 66643 - DNA, 80 bp, synthetic construct; identical to SEQ ID NO: 32436
  source 1..80: mol_type = other DNA

SEQ ID NO: 66644 - DNA, 80 bp, synthetic construct; identical to SEQ ID NO: 32437
  source 1..80: mol_type = other DNA

SEQ ID NO: 66645 - DNA, 80 bp, synthetic construct; identical to SEQ ID NO: 32438
  source 1..80: mol_type = other DNA

SEQ ID NO: 66646 - DNA, 80 bp, synthetic construct; identical to SEQ ID NO: 11999
  source 1..80: mol_type = other DNA

SEQ ID NO: 66647 - DNA, 80 bp, synthetic construct; identical to SEQ ID NO: 32440
  source 1..80: mol_type = other DNA

SEQ ID NO: 66648 - DNA, 80 bp, synthetic construct; identical to SEQ ID NO: 32441
  source 1..80: mol_type = other DNA

SEQ ID NO: 66649 - DNA, 80 bp, synthetic construct; identical to SEQ ID NO: 32442
  source 1..80: mol_type = other DNA

SEQ ID NO: 66650 - DNA, 80 bp, synthetic construct; identical to SEQ ID NO: 32443
  source 1..80: mol_type = other DNA

SEQ ID NO: 66651 - DNA, 80 bp, synthetic construct; identical to SEQ ID NO: 12000
  source 1..80: mol_type = other DNA

SEQ ID NO: 66652 - DNA, 80 bp, synthetic construct; identical to SEQ ID NO: 32445
  source 1..80: mol_type = other DNA

SEQ ID NO: 66653 - DNA, 80 bp, synthetic construct; identical to SEQ ID NO: 32446
  source 1..80: mol_type = other DNA

SEQ ID NO: 66654 - DNA, 80 bp, synthetic construct; identical to SEQ ID NO: 12001
  source 1..80: mol_type = other DNA

SEQ ID NO: 66655 - DNA, 80 bp, synthetic construct; identical to SEQ ID NO: 32448
  source 1..80: mol_type = other DNA

SEQ ID NO: 66656 - DNA, 80 bp, synthetic construct; identical to SEQ ID NO: 32449
  source 1..80: mol_type = other DNA

SEQ ID NO: 66657 - DNA, 80 bp, synthetic construct; identical to SEQ ID NO: 32450
  source 1..80: mol_type = other DNA

SEQ ID NO: 66658 - DNA, 80 bp, synthetic construct; identical to SEQ ID NO: 12002
  source 1..80: mol_type = other DNA

SEQ ID NO: 66659 - DNA, 80 bp, synthetic construct; identical to SEQ ID NO: 32452
  source 1..80: mol_type = other DNA

SEQ ID NO: 66660 - DNA, 80 bp, synthetic construct; identical to SEQ ID NO: 32453
  source 1..80: mol_type = other DNA

SEQ ID NO: 66661 - DNA, 80 bp, synthetic construct; identical to SEQ ID NO: 32454
  source 1..80: mol_type = other DNA

SEQ ID NO: 66662 - DNA, 80 bp, synthetic construct; identical to SEQ ID NO: 12003
  source 1..80: mol_type = other DNA

SEQ ID NO: 66663 - DNA, 80 bp, synthetic construct; identical to SEQ ID NO: 32457
  source 1..80: mol_type = other DNA

SEQ ID NO: 66664 - DNA, 80 bp, synthetic construct; identical to SEQ ID NO: 32458
  source 1..80: mol_type = other DNA

SEQ ID NO: 66665 - DNA, 80 bp, synthetic construct; identical to SEQ ID NO: 32459
  source 1..80: mol_type = other DNA

SEQ ID NO: 66666 - DNA, 80 bp, synthetic construct; identical to SEQ ID NO: 32460
  source 1..80: mol_type = other DNA

SEQ ID NO: 66667 - DNA, 80 bp, synthetic construct; identical to SEQ ID NO: 12004
  source 1..80: mol_type = other DNA

SEQ ID NO: 66668 - DNA, 80 bp, synthetic construct; identical to SEQ ID NO: 32462
  source 1..80: mol_type = other DNA

SEQ ID NO: 66669 - DNA, 80 bp, synthetic construct; identical to SEQ ID NO: 32463
  source 1..80: mol_type = other DNA

SEQ ID NO: 66670 - DNA, 80 bp, synthetic construct; identical to SEQ ID NO: 12005
  source 1..80: mol_type = other DNA

SEQ ID NO: 66671 - DNA, 80 bp, synthetic construct; identical to SEQ ID NO: 32465
  source 1..80: mol_type = other DNA

SEQ ID NO: 66672 - DNA, 80 bp, synthetic construct; identical to SEQ ID NO: 32466
  source 1..80: mol_type = other DNA

SEQ ID NO: 66673 - DNA, 80 bp, synthetic construct; identical to SEQ ID NO: 12006
  source 1..80: mol_type = other DNA

SEQ ID NO: 66674 - DNA, 80 bp, synthetic construct; identical to SEQ ID NO: 32468
  source 1..80: mol_type = other DNA

SEQ ID NO: 66675 - DNA, 80 bp, synthetic construct; identical to SEQ ID NO: 32470
  source 1..80: mol_type = other DNA

SEQ ID NO: 66676 - DNA, 80 bp, synthetic construct; identical to SEQ ID NO: 12007
  source 1..80: mol_type = other DNA

SEQ ID NO: 66677 - DNA, 80 bp, synthetic construct; identical to SEQ ID NO: 32472
  source 1..80: mol_type = other DNA

SEQ ID NO: 66678 - DNA, 80 bp, synthetic construct; identical to SEQ ID NO: 32473
  source 1..80: mol_type = other DNA

SEQ ID NO: 66679 - DNA, 80 bp, synthetic construct; identical to SEQ ID NO: 32474
  source 1..80: mol_type = other DNA

SEQ ID NO: 66680 - DNA, 80 bp, synthetic construct; identical to SEQ ID NO: 12008
  source 1..80: mol_type = other DNA

SEQ ID NO: 66681 - DNA, 80 bp, synthetic construct; identical to SEQ ID NO: 32477
  source 1..80: mol_type = other DNA

SEQ ID NO: 66682 - DNA, 80 bp, synthetic construct; identical to SEQ ID NO: 32478
  source 1..80: mol_type = other DNA

SEQ ID NO: 66683 - DNA, 80 bp, synthetic construct; identical to SEQ ID NO: 32479
  source 1..80: mol_type = other DNA

SEQ ID NO: 66684 - DNA, 80 bp, synthetic construct; identical to SEQ ID NO: 12009
  source 1..80: mol_type = other DNA

SEQ ID NO: 66685 - DNA, 80 bp, synthetic construct; identical to SEQ ID NO: 32481
  source 1..80: mol_type = other DNA

SEQ ID NO: 66686 - DNA, 80 bp, synthetic construct; identical to SEQ ID NO: 32482
  source 1..80: mol_type = other DNA

SEQ ID NO: 66687 - DNA, 80 bp, synthetic construct; identical to SEQ ID NO: 12010
  source 1..80: mol_type = other DNA

SEQ ID NO: 66688 - DNA, 80 bp, synthetic construct; identical to SEQ ID NO: 32485
  source 1..80: mol_type = other DNA

SEQ ID NO: 66689 - DNA, 80 bp, synthetic construct; identical to SEQ ID NO: 32486
  source 1..80: mol_type = other DNA

SEQ ID NO: 66690 - DNA, 80 bp, synthetic construct; identical to SEQ ID NO: 12011
  source 1..80: mol_type = other DNA

SEQ ID NO: 66691 - DNA, 80 bp, synthetic construct; identical to SEQ ID NO: 32488
  source 1..80: mol_type = other DNA

SEQ ID NO: 66692 - DNA, 80 bp, synthetic construct; identical to SEQ ID NO: 32489
  source 1..80: mol_type = other DNA

SEQ ID NO: 66693 - DNA, 80 bp, synthetic construct; identical to SEQ ID NO: 32490
  source 1..80: mol_type = other DNA

SEQ ID NO: 66694 - DNA, 80 bp, synthetic construct; identical to SEQ ID NO: 12012
  source 1..80: mol_type = other DNA

SEQ ID NO: 66695 - DNA, 80 bp, synthetic construct; identical to SEQ ID NO: 32492
  source 1..80: mol_type = other DNA

SEQ ID NO: 66696 - DNA, 80 bp, synthetic construct; identical to SEQ ID NO: 32493
  source 1..80: mol_type = other DNA

SEQ ID NO: 66697 - DNA, 80 bp, synthetic construct; identical to SEQ ID NO: 32494
  source 1..80: mol_type = other DNA

SEQ ID NO: 66698 - DNA, 80 bp, synthetic construct; identical to SEQ ID NO: 32495
  source 1..80: mol_type = other DNA

SEQ ID NO: 66699 - DNA, 80 bp, synthetic construct; identical to SEQ ID NO: 12013
  source 1..80: mol_type = other DNA

SEQ ID NO: 66700 - DNA, 80 bp, synthetic construct; identical to SEQ ID NO: 32497
  source 1..80: mol_type = other DNA

SEQ ID NO: 66701 - DNA, 80 bp, synthetic construct; identical to SEQ ID NO: 12014
  source 1..80: mol_type = other DNA

SEQ ID NO: 66702 - DNA, 80 bp, synthetic construct; identical to SEQ ID NO: 32499
  source 1..80: mol_type = other DNA

SEQ ID NO: 66703 - DNA, 80 bp, synthetic construct; identical to SEQ ID NO: 32500
  source 1..80: mol_type = other DNA

SEQ ID NO: 66704 - DNA, 80 bp, synthetic construct; identical to SEQ ID NO: 32501
  source 1..80: mol_type = other DNA

SEQ ID NO: 66705 - DNA, 80 bp, synthetic construct; identical to SEQ ID NO: 32502
  source 1..80: mol_type = other DNA

SEQ ID NO: 66706 - DNA, 80 bp, synthetic construct; identical to SEQ ID NO: 32503
  source 1..80: mol_type = other DNA

SEQ ID NO: 66707 - DNA, 80 bp, synthetic construct; identical to SEQ ID NO: 12015
  source 1..80: mol_type = other DNA

SEQ ID NO: 66708 - DNA, 80 bp, synthetic construct; identical to SEQ ID NO: 32505
  source 1..80: mol_type = other DNA

SEQ ID NO: 66709 - DNA, 80 bp, synthetic construct; identical to SEQ ID NO: 12016
  source 1..80: mol_type = other DNA

SEQ ID NO: 66710 - DNA, 80 bp, synthetic construct; identical to SEQ ID NO: 32507
  source 1..80: mol_type = other DNA

SEQ ID NO: 66711 - DNA, 80 bp, synthetic construct; identical to SEQ ID NO: 32508
  source 1..80: mol_type = other DNA

SEQ ID NO: 66712 - DNA, 80 bp, synthetic construct; identical to SEQ ID NO: 32509
  source 1..80: mol_type = other DNA

SEQ ID NO: 66713 - DNA, 80 bp, synthetic construct; identical to SEQ ID NO: 12017
  source 1..80: mol_type = other DNA

SEQ ID NO: 66714 - DNA, 80 bp, synthetic construct; identical to SEQ ID NO: 32511
  source 1..80: mol_type = other DNA

SEQ ID NO: 66715 - DNA, 80 bp, synthetic construct; identical to SEQ ID NO: 32512
  source 1..80: mol_type = other DNA

SEQ ID NO: 66716 - DNA, 80 bp, synthetic construct; identical to SEQ ID NO: 32513
  source 1..80: mol_type = other DNA

SEQ ID NO: 66717 - DNA, 80 bp, synthetic construct; identical to SEQ ID NO: 12018
  source 1..80: mol_type = other DNA

SEQ ID NO: 66718 - DNA, 80 bp, synthetic construct; identical to SEQ ID NO: 32515
  source 1..80: mol_type = other DNA

SEQ ID NO: 66719 - DNA, 80 bp, synthetic construct; identical to SEQ ID NO: 32516
  source 1..80: mol_type = other DNA

SEQ ID NO: 66720 - DNA, 80 bp, synthetic construct; identical to SEQ ID NO: 32517
  source 1..80: mol_type = other DNA

SEQ ID NO: 66721 - DNA, 80 bp, synthetic construct; identical to SEQ ID NO: 12019
  source 1..80: mol_type = other DNA

SEQ ID NO: 66722 - DNA, 80 bp, synthetic construct; identical to SEQ ID NO: 32519
  source 1..80: mol_type = other DNA

SEQ ID NO: 66723 - DNA, 80 bp, synthetic construct; identical to SEQ ID NO: 32520
  source 1..80: mol_type = other DNA

SEQ ID NO: 66724 - DNA, 80 bp, synthetic construct; identical to SEQ ID NO: 32521
  source 1..80: mol_type = other DNA

SEQ ID NO: 66725 - DNA, 80 bp, synthetic construct; identical to SEQ ID NO: 32522
  source 1..80: mol_type = other DNA

SEQ ID NO: 66726 - DNA, 80 bp, synthetic construct; identical to SEQ ID NO: 12020
  source 1..80: mol_type = other DNA

SEQ ID NO: 66727 - DNA, 80 bp, synthetic construct; identical to SEQ ID NO: 32524
  source 1..80: mol_type = other DNA

SEQ ID NO: 66728 - DNA, 80 bp, synthetic construct; identical to SEQ ID NO: 32525
  source 1..80: mol_type = other DNA

SEQ ID NO: 66729 - DNA, 80 bp, synthetic construct; identical to SEQ ID NO: 32526
  source 1..80: mol_type = other DNA

SEQ ID NO: 66730 - DNA, 80 bp, synthetic construct; identical to SEQ ID NO: 12021
  source 1..80: mol_type = other DNA

SEQ ID NO: 66731 - DNA, 80 bp, synthetic construct; identical to SEQ ID NO: 32528
  source 1..80: mol_type = other DNA

SEQ ID NO: 66732 - DNA, 80 bp, synthetic construct; identical to SEQ ID NO: 32529
  source 1..80: mol_type = other DNA

SEQ ID NO: 66733 - DNA, 80 bp, synthetic construct; identical to SEQ ID NO: 12022
  source 1..80: mol_type = other DNA

SEQ ID NO: 66734 - DNA, 80 bp, synthetic construct; identical to SEQ ID NO: 32531
  source 1..80: mol_type = other DNA

SEQ ID NO: 66735 - DNA, 80 bp, synthetic construct; identical to SEQ ID NO: 32532
  source 1..80: mol_type = other DNA

SEQ ID NO: 66736 - DNA, 80 bp, synthetic construct; identical to SEQ ID NO: 32533
  source 1..80: mol_type = other DNA

SEQ ID NO: 66737 - DNA, 80 bp, synthetic construct; identical to SEQ ID NO: 12023
  source 1..80: mol_type = other DNA

SEQ ID NO: 66738 - DNA, 80 bp, synthetic construct; identical to SEQ ID NO: 32535
  source 1..80: mol_type = other DNA

SEQ ID NO: 66739 - DNA, 80 bp, synthetic construct; identical to SEQ ID NO: 32536
  source 1..80: mol_type = other DNA

SEQ ID NO: 66740 - DNA, 80 bp, synthetic construct; identical to SEQ ID NO: 32537
  source 1..80: mol_type = other DNA

SEQ ID NO: 66741 - DNA, 80 bp, synthetic construct; identical to SEQ ID NO: 32538
  source 1..80: mol_type = other DNA

SEQ ID NO: 66742 - DNA, 80 bp, synthetic construct; identical to SEQ ID NO: 12024
  source 1..80: mol_type = other DNA

SEQ ID NO: 66743 - DNA, 80 bp, synthetic construct; identical to SEQ ID NO: 32540
  source 1..80: mol_type = other DNA

SEQ ID NO: 66744 - DNA, 80 bp, synthetic construct; identical to SEQ ID NO: 32541
  source 1..80: mol_type = other DNA

SEQ ID NO: 66745 - DNA, 80 bp, synthetic construct; identical to SEQ ID NO: 32542
  source 1..80: mol_type = other DNA

SEQ ID NO: 66746 - DNA, 80 bp, synthetic construct; identical to SEQ ID NO: 12025
  source 1..80: mol_type = other DNA

SEQ ID NO: 66747 - DNA, 80 bp, synthetic construct; identical to SEQ ID NO: 32544
  source 1..80: mol_type = other DNA

SEQ ID NO: 66748 - DNA, 80 bp, synthetic construct; identical to SEQ ID NO: 32545
  source 1..80: mol_type = other DNA

SEQ ID NO: 66749 - DNA, 80 bp, synthetic construct; identical to SEQ ID NO: 32546
  source 1..80: mol_type = other DNA

SEQ ID NO: 66750 - DNA, 80 bp, synthetic construct; identical to SEQ ID NO: 12026
  source 1..80: mol_type = other DNA

SEQ ID NO: 66751 - DNA, 80 bp, synthetic construct; identical to SEQ ID NO: 32548
  source 1..80: mol_type = other DNA

SEQ ID NO: 66752 - DNA, 80 bp, synthetic construct; identical to SEQ ID NO: 32549
  source 1..80: mol_type = other DNA

SEQ ID NO: 66753 - DNA, 80 bp, synthetic construct; identical to SEQ ID NO: 32550
  source 1..80: mol_type = other DNA

SEQ ID NO: 66754 - DNA, 80 bp, synthetic construct; identical to SEQ ID NO: 12027
  source 1..80: mol_type = other DNA

SEQ ID NO: 66755 - DNA, 80 bp, synthetic construct; identical to SEQ ID NO: 32552
  source 1..80: mol_type = other DNA

SEQ ID NO: 66756 - DNA, 80 bp, synthetic construct; identical to SEQ ID NO: 32553
  source 1..80: mol_type = other DNA

SEQ ID NO: 66757 - DNA, 80 bp, synthetic construct; identical to SEQ ID NO: 32554
  source 1..80: mol_type = other DNA

SEQ ID NO: 66758 - DNA, 80 bp, synthetic construct; identical to SEQ ID NO: 12028
  source 1..80: mol_type = other DNA

SEQ ID NO: 66759 - DNA, 80 bp, synthetic construct; identical to SEQ ID NO: 32556
  source 1..80: mol_type = other DNA

SEQ ID NO: 66760 - DNA, 80 bp, synthetic construct; identical to SEQ ID NO: 32557
  source 1..80: mol_type = other DNA

SEQ ID NO: 66761 - DNA, 80 bp, synthetic construct; identical to SEQ ID NO: 32558
  source 1..80: mol_type = other DNA

SEQ ID NO: 66762 - DNA, 80 bp, synthetic construct; identical to SEQ ID NO: 32559
  source 1..80: mol_type = other DNA

SEQ ID NO: 66763 - DNA, 80 bp, synthetic construct; identical to SEQ ID NO: 12029
  source 1..80: mol_type = other DNA

SEQ ID NO: 66764 - DNA, 80 bp, synthetic construct; identical to SEQ ID NO: 32561
  source 1..80: mol_type = other DNA

SEQ ID NO: 66765 - DNA, 80 bp, synthetic construct; identical to SEQ ID NO: 32562
  source 1..80: mol_type = other DNA

SEQ ID NO: 66766 - DNA, 80 bp, synthetic construct; identical to SEQ ID NO: 12030
  source 1..80: mol_type = other DNA

SEQ ID NO: 66767 - DNA, 80 bp, synthetic construct; identical to SEQ ID NO: 32564
  source 1..80: mol_type = other DNA

SEQ ID NO: 66768 - DNA, 80 bp, synthetic construct; identical to SEQ ID NO: 32565
  source 1..80: mol_type = other DNA

SEQ ID NO: 66769 - DNA, 80 bp, synthetic construct; identical to SEQ ID NO: 32566
  source 1..80: mol_type = other DNA

SEQ ID NO: 66770 - DNA, 80 bp, synthetic construct; identical to SEQ ID NO: 32567
  source 1..80: mol_type = other DNA

SEQ ID NO: 66771 - DNA, 80 bp, synthetic construct; identical to SEQ ID NO: 12031
  source 1..80: mol_type = other DNA

SEQ ID NO: 66772 - DNA, 80 bp, synthetic construct; identical to SEQ ID NO: 32569
  source 1..80: mol_type = other DNA

SEQ ID NO: 66773 - DNA, 80 bp, synthetic construct; identical to SEQ ID NO: 32570
  source 1..80: mol_type = other DNA

SEQ ID NO: 66774 - DNA, 80 bp, synthetic construct; identical to SEQ ID NO: 32571
  source 1..80: mol_type = other DNA

SEQ ID NO: 66775 - DNA, 80 bp, synthetic construct; identical to SEQ ID NO: 12032
  source 1..80: mol_type = other DNA

SEQ ID NO: 66776 - DNA, 80 bp, synthetic construct; identical to SEQ ID NO: 32573
  source 1..80: mol_type = other DNA

SEQ ID NO: 66777 - DNA, 80 bp, synthetic construct; identical to SEQ ID NO: 32574
  source 1..80: mol_type = other DNA

SEQ ID NO: 66778 - DNA, 80 bp, synthetic construct; identical to SEQ ID NO: 32575
  source 1..80: mol_type = other DNA

SEQ ID NO: 66779 - DNA, 80 bp, synthetic construct; identical to SEQ ID NO: 12033
  source 1..80: mol_type = other DNA

SEQ ID NO: 66780 - DNA, 80 bp, synthetic construct; identical to SEQ ID NO: 32577
  source 1..80: mol_type = other DNA

SEQ ID NO: 66781 - DNA, 80 bp, synthetic construct; identical to SEQ ID NO: 32578
  source 1..80: mol_type = other DNA

SEQ ID NO: 66782 - DNA, 80 bp, synthetic construct; identical to SEQ ID NO: 32579
  source 1..80: mol_type = other DNA

SEQ ID NO: 66783 - DNA, 80 bp, synthetic construct; identical to SEQ ID NO: 12034
  source 1..80: mol_type = other DNA

SEQ ID NO: 66784 - DNA, 80 bp, synthetic construct; identical to SEQ ID NO: 32581
  source 1..80: mol_type = other DNA

SEQ ID NO: 66785 - DNA, 80 bp, synthetic construct; identical to SEQ ID NO: 32583
  source 1..80: mol_type = other DNA

SEQ ID NO: 66786 - DNA, 80 bp, synthetic construct; identical to SEQ ID NO: 32584
  source 1..80: mol_type = other DNA

SEQ ID NO: 66787 - DNA, 80 bp, synthetic construct; identical to SEQ ID NO: 12035
  source 1..80: mol_type = other DNA

SEQ ID NO: 66788 - DNA, 80 bp, synthetic construct; identical to SEQ ID NO: 32586
  source 1..80: mol_type = other DNA

SEQ ID NO: 66789 - DNA, 80 bp, synthetic construct; identical to SEQ ID NO: 32587
  source 1..80: mol_type = other DNA

SEQ ID NO: 66790 - DNA, 80 bp, synthetic construct; identical to SEQ ID NO: 32588
  source 1..80: mol_type = other DNA

SEQ ID NO: 66791 - DNA, 80 bp, synthetic construct; identical to SEQ ID NO: 12036
  source 1..80: mol_type = other DNA

SEQ ID NO: 66792 - DNA, 80 bp, synthetic construct; identical to SEQ ID NO: 32590
  source 1..80: mol_type = other DNA

SEQ ID NO: 66793 - DNA, 80 bp, synthetic construct; identical to SEQ ID NO: 32591
  source 1..80: mol_type = other DNA

SEQ ID NO: 66794 - DNA, 80 bp, synthetic construct; identical to SEQ ID NO: 32592
  source 1..80: mol_type = other DNA

SEQ ID NO: 66795 - DNA, 80 bp, synthetic construct; identical to SEQ ID NO: 32593
  source 1..80: mol_type = other DNA

SEQ ID NO: 66796 - DNA, 80 bp, synthetic construct; identical to SEQ ID NO: 12037
  source 1..80: mol_type = other DNA

SEQ ID NO: 66797 - DNA, 80 bp, synthetic construct; identical to SEQ ID NO: 32595
  source 1..80: mol_type = other DNA

SEQ ID NO: 66798 - DNA, 80 bp, synthetic construct; identical to SEQ ID NO: 32596
  source 1..80: mol_type = other DNA

SEQ ID NO: 66799 - DNA, 80 bp, synthetic construct; identical to SEQ ID NO: 32597
  source 1..80: mol_type = other DNA

SEQ ID NO: 66800 - DNA, 80 bp, synthetic construct; identical to SEQ ID NO: 32598
  source 1..80: mol_type = other DNA

SEQ ID NO: 66801 - DNA, 80 bp, synthetic construct; identical to SEQ ID NO: 12038
  source 1..80: mol_type = other DNA

SEQ ID NO: 66802 - DNA, 80 bp, synthetic construct; identical to SEQ ID NO: 32600
  source 1..80: mol_type = other DNA

SEQ ID NO: 66803 - DNA, 80 bp, synthetic construct; identical to SEQ ID NO: 32601
  source 1..80: mol_type = other DNA

SEQ ID NO: 66804 - DNA, 80 bp, synthetic construct; identical to SEQ ID NO: 32602
  source 1..80: mol_type = other DNA

SEQ ID NO: 66805 - DNA, 80 bp, synthetic construct; identical to SEQ ID NO: 12039
  source 1..80: mol_type = other DNA

SEQ ID NO: 66806 - DNA, 80 bp, synthetic construct; identical to SEQ ID NO: 32604
  source 1..80: mol_type = other DNA

SEQ ID NO: 66807 - DNA, 80 bp, synthetic construct; identical to SEQ ID NO: 32605
  source 1..80: mol_type = other DNA

SEQ ID NO: 66808 - DNA, 80 bp, synthetic construct; identical to SEQ ID NO: 12040
  source 1..80: mol_type = other DNA

SEQ ID NO: 66809 - DNA, 80 bp, synthetic construct; identical to SEQ ID NO: 32607
  source 1..80: mol_type = other DNA

SEQ ID NO: 66810 - DNA, 80 bp, synthetic construct; identical to SEQ ID NO: 32608
  source 1..80: mol_type = other DNA

SEQ ID NO: 66811 - DNA, 80 bp, synthetic construct; identical to SEQ ID NO: 32609
  source 1..80: mol_type = other DNA

SEQ ID NO: 66812 - DNA, 80 bp, synthetic construct; identical to SEQ ID NO: 32610
  source 1..80: mol_type = other DNA

SEQ ID NO: 66813 - DNA, 80 bp, synthetic construct; identical to SEQ ID NO: 12041
  source 1..80: mol_type = other DNA

SEQ ID NO: 66814 - DNA, 80 bp, synthetic construct; identical to SEQ ID NO: 32612
  source 1..80: mol_type = other DNA

SEQ ID NO: 66815 - DNA, 80 bp, synthetic construct; identical to SEQ ID NO: 32613
  source 1..80: mol_type = other DNA

SEQ ID NO: 66816 - DNA, 80 bp, synthetic construct; identical to SEQ ID NO: 12042
  source 1..80: mol_type = other DNA

SEQ ID NO: 66817 - DNA, 80 bp, synthetic construct; identical to SEQ ID NO: 32615
  source 1..80: mol_type = other DNA

SEQ ID NO: 66818 - DNA, 80 bp, synthetic construct; identical to SEQ ID NO: 32616
  source 1..80: mol_type = other DNA

SEQ ID NO: 66819 - DNA, 80 bp, synthetic construct; identical to SEQ ID NO: 32617
  source 1..80: mol_type = other DNA

SEQ ID NO: 66820 - DNA, 80 bp, synthetic construct; identical to SEQ ID NO: 12043
  source 1..80: mol_type = other DNA

SEQ ID NO: 66821 - DNA, 80 bp, synthetic construct; identical to SEQ ID NO: 32619
  source 1..80: mol_type = other DNA

SEQ ID NO: 66822 - DNA, 80 bp, synthetic construct; identical to SEQ ID NO: 32620
  source 1..80: mol_type = other DNA

SEQ ID NO: 66823 - DNA, 80 bp, synthetic construct; identical to SEQ ID NO: 32621
  source 1..80: mol_type = other DNA

SEQ ID NO: 66824 - DNA, 80 bp, synthetic construct; identical to SEQ ID NO: 32622
  source 1..80: mol_type = other DNA

SEQ ID NO: 66825 - DNA, 80 bp, synthetic construct; identical to SEQ ID NO: 12044
  source 1..80: mol_type = other DNA

SEQ ID NO: 66826 - DNA, 80 bp, synthetic construct; identical to SEQ ID NO: 32624
  source 1..80: mol_type = other DNA

SEQ ID NO: 66827 - DNA, 80 bp, synthetic construct; identical to SEQ ID NO: 32625
  source 1..80: mol_type = other DNA

SEQ ID NO: 66828 - DNA, 80 bp, synthetic construct; identical to SEQ ID NO: 32626
  source 1..80: mol_type = other DNA

SEQ ID NO: 66829 - DNA, 80 bp, synthetic construct; identical to SEQ ID NO: 32627
  source 1..80: mol_type = other DNA

SEQ ID NO: 66830 - DNA, 80 bp, synthetic construct; identical to SEQ ID NO: 12045
  source 1..80: mol_type = other DNA

SEQ ID NO: 66831 - DNA, 80 bp, synthetic construct; identical to SEQ ID NO: 32630
  source 1..80: mol_type = other DNA

SEQ ID NO: 66832 - DNA, 80 bp, synthetic construct; identical to SEQ ID NO: 32631
  source 1..80: mol_type = other DNA

SEQ ID NO: 66833 - DNA, 80 bp, synthetic construct; identical to SEQ ID NO: 12046
  source 1..80: mol_type = other DNA

SEQ ID NO: 66834 - DNA, 80 bp, synthetic construct; identical to SEQ ID NO: 32633
  source 1..80: mol_type = other DNA

SEQ ID NO: 66835 - DNA, 80 bp, synthetic construct; identical to SEQ ID NO: 32634
  source 1..80: mol_type = other DNA

SEQ ID NO: 66836 - DNA, 80 bp, synthetic construct; identical to SEQ ID NO: 12047
  source 1..80: mol_type = other DNA

SEQ ID NO: 66837 - DNA, 80 bp, synthetic construct; identical to SEQ ID NO: 32636
  source 1..80: mol_type = other DNA

SEQ ID NO: 66838 - DNA, 80 bp, synthetic construct; identical to SEQ ID NO: 32637
  source 1..80: mol_type = other DNA

SEQ ID NO: 66839 - DNA, 80 bp, synthetic construct; identical to SEQ ID NO: 32638
  source 1..80: mol_type = other DNA

SEQ ID NO: 66840 - DNA, 80 bp, synthetic construct; identical to SEQ ID NO: 12048
  source 1..80: mol_type = other DNA

SEQ ID NO: 66841 - DNA, 80 bp, synthetic construct; identical to SEQ ID NO: 32640
  source 1..80: mol_type = other DNA

SEQ ID NO: 66842 - DNA, 80 bp, synthetic construct; identical to SEQ ID NO: 32641
  source 1..80: mol_type = other DNA

SEQ ID NO: 66843 - DNA, 80 bp, synthetic construct; identical to SEQ ID NO: 32642
  source 1..80: mol_type = other DNA

SEQ ID NO: 66844 - DNA, 80 bp, synthetic construct; identical to SEQ ID NO: 12049
  source 1..80: mol_type = other DNA

SEQ ID NO: 66845 - DNA, 80 bp, synthetic construct; identical to SEQ ID NO: 32644
  source 1..80: mol_type = other DNA

SEQ ID NO: 66846 - DNA, 80 bp, synthetic construct; identical to SEQ ID NO: 32645
  source 1..80: mol_type = other DNA

SEQ ID NO: 66847 - DNA, 80 bp, synthetic construct; identical to SEQ ID NO: 32646
  source 1..80: mol_type = other DNA

SEQ ID NO: 66848 - DNA, 80 bp, synthetic construct; identical to SEQ ID NO: 32647
  source 1..80: mol_type = other DNA

SEQ ID NO: 66849 - DNA, 80 bp, synthetic construct; identical to SEQ ID NO: 12050
  source 1..80: mol_type = other DNA

SEQ ID NO: 66850 - DNA, 80 bp, synthetic construct; identical to SEQ ID NO: 32649
  source 1..80: mol_type = other DNA

SEQ ID NO: 66851 - DNA, 80 bp, synthetic construct; identical to SEQ ID NO: 32650
  source 1..80: mol_type = other DNA

SEQ ID NO: 66852 - DNA, 80 bp, synthetic construct; identical to SEQ ID NO: 32651
  source 1..80: mol_type = other DNA

SEQ ID NO: 66853 - DNA, 80 bp, synthetic construct; identical to SEQ ID NO: 12051
  source 1..80: mol_type = other DNA

SEQ ID NO: 66854 - DNA, 80 bp, synthetic construct; identical to SEQ ID NO: 32653
  source 1..80: mol_type = other DNA

SEQ ID NO: 66855 - DNA, 80 bp, synthetic construct; identical to SEQ ID NO: 32654
  source 1..80: mol_type = other DNA

SEQ ID NO: 66856 - DNA, 80 bp, synthetic construct; identical to SEQ ID NO: 32655
  source 1..80: mol_type = other DNA

SEQ ID NO: 66857 - DNA, 80 bp, synthetic construct; identical to SEQ ID NO: 12052
  source 1..80: mol_type = other DNA

SEQ ID NO: 66858 - DNA, 80 bp, synthetic construct; identical to SEQ ID NO: 32657
  source 1..80: mol_type = other DNA

SEQ ID NO: 66859 - DNA, 80 bp, synthetic construct; identical to SEQ ID NO: 32658
  source 1..80: mol_type = other DNA

SEQ ID NO: 66860 - DNA, 80 bp, synthetic construct; identical to SEQ ID NO: 32659
  source 1..80: mol_type = other DNA

SEQ ID NO: 66861 - DNA, 80 bp, synthetic construct; identical to SEQ ID NO: 32660
  source 1..80: mol_type = other DNA

SEQ ID NO: 66862 - DNA, 80 bp, synthetic construct; identical to SEQ ID NO: 12053
  source 1..80: mol_type = other DNA

SEQ ID NO: 66863 - DNA, 80 bp, synthetic construct; identical to SEQ ID NO: 32662
  source 1..80: mol_type = other DNA

SEQ ID NO: 66864 - DNA, 80 bp, synthetic construct; identical to SEQ ID NO: 32663
  source 1..80: mol_type = other DNA

SEQ ID NO: 66865 - DNA, 80 bp, synthetic construct; identical to SEQ ID NO: 32664
  source 1..80: mol_type = other DNA

SEQ ID NO: 66866 - DNA, 80 bp, synthetic construct; identical to SEQ ID NO: 12054
  source 1..80: mol_type = other DNA

SEQ ID NO: 66867 - DNA, 80 bp, synthetic construct; identical to SEQ ID NO: 32666
  source 1..80: mol_type = other DNA

SEQ ID NO: 66868 - DNA, 80 bp, synthetic construct; identical to SEQ ID NO: 32667
  source 1..80: mol_type = other DNA

SEQ ID NO: 66869 - DNA, 80 bp, synthetic construct; identical to SEQ ID NO: 12055
  source 1..80: mol_type = other DNA

SEQ ID NO: 66870 - DNA, 80 bp, synthetic construct; identical to SEQ ID NO: 32669
  source 1..80: mol_type = other DNA

SEQ ID NO: 66871 - DNA, 80 bp, synthetic construct; identical to SEQ ID NO: 32670
  source 1..80: mol_type = other DNA

SEQ ID NO: 66872 - DNA, 80 bp, synthetic construct; identical to SEQ ID NO: 32671
  source 1..80: mol_type = other DNA

SEQ ID NO: 66873 - DNA, 80 bp, synthetic construct; identical to SEQ ID NO: 12056
  source 1..80: mol_type = other DNA

SEQ ID NO: 66874 - DNA, 80 bp, synthetic construct; identical to SEQ ID NO: 32673
  source 1..80: mol_type = other DNA

SEQ ID NO: 66875 - DNA, 80 bp, synthetic construct; identical to SEQ ID NO: 32674
  source 1..80: mol_type = other DNA

SEQ ID NO: 66876 - DNA, 80 bp, synthetic construct; identical to SEQ ID NO: 32675
  source 1..80: mol_type = other DNA

SEQ ID NO: 66877 - DNA, 80 bp, synthetic construct; identical to SEQ ID NO: 32676
  source 1..80: mol_type = other DNA

SEQ ID NO: 66878 - DNA, 80 bp, synthetic construct; identical to SEQ ID NO: 12057
  source 1..80: mol_type = other DNA

SEQ ID NO: 66879 - DNA, 80 bp, synthetic construct; identical to SEQ ID NO: 32678
  source 1..80: mol_type = other DNA

SEQ ID NO: 66880 - DNA, 80 bp, synthetic construct; identical to SEQ ID NO: 32679
  source 1..80: mol_type = other DNA

SEQ ID NO: 66881 - DNA, 80 bp, synthetic construct; identical to SEQ ID NO: 12058
  source 1..80: mol_type = other DNA

SEQ ID NO: 66882 - DNA, 80 bp, synthetic construct; identical to SEQ ID NO: 32681
  source 1..80: mol_type = other DNA

SEQ ID NO: 66883 - DNA, 80 bp, synthetic construct; identical to SEQ ID NO: 32682
  source 1..80: mol_type = other DNA

SEQ ID NO: 66884 - DNA, 80 bp, synthetic construct; identical to SEQ ID NO: 32683
  source 1..80: mol_type = other DNA

SEQ ID NO: 66885 - DNA, 80 bp, synthetic construct; identical to SEQ ID NO: 12059
  source 1..80: mol_type = other DNA

SEQ ID NO: 66886 - DNA, 80 bp, synthetic construct; identical to SEQ ID NO: 32685
  source 1..80: mol_type = other DNA

SEQ ID NO: 66887 - DNA, 80 bp, synthetic construct; identical to SEQ ID NO: 32686
  source 1..80: mol_type = other DNA

SEQ ID NO: 66888 - DNA, 80 bp, synthetic construct; identical to SEQ ID NO: 32687
  source 1..80: mol_type = other DNA

SEQ ID NO: 66889 - DNA, 80 bp, synthetic construct; identical to SEQ ID NO: 12060
  source 1..80: mol_type = other DNA

SEQ ID NO: 66890 - DNA, 80 bp, synthetic construct; identical to SEQ ID NO: 32689
  source 1..80: mol_type = other DNA

SEQ ID NO: 66891 - DNA, 80 bp, synthetic construct; identical to SEQ ID NO: 32690
  source 1..80: mol_type = other DNA

SEQ ID NO: 66892 - DNA, 80 bp, synthetic construct; identical to SEQ ID NO: 32691
  source 1..80: mol_type = other DNA

SEQ ID NO: 66893 - DNA, 80 bp, synthetic construct; identical to SEQ ID NO: 32692
  source 1..80: mol_type = other DNA

SEQ ID NO: 66894 - DNA, 80 bp, synthetic construct; identical to SEQ ID NO: 12061
  source 1..80: mol_type = other DNA

SEQ ID NO: 66895 - DNA, 80 bp, synthetic construct; identical to SEQ ID NO: 32694
  source 1..80: mol_type = other DNA

SEQ ID NO: 66896 - DNA, 80 bp, synthetic construct; identical to SEQ ID NO: 32695
  source 1..80: mol_type = other DNA

SEQ ID NO: 66897 - DNA, 80 bp, synthetic construct; identical to SEQ ID NO: 32696
  source 1..80: mol_type = other DNA

SEQ ID NO: 66898 - DNA, 80 bp, synthetic construct; identical to SEQ ID NO: 12062
  source 1..80: mol_type = other DNA

SEQ ID NO: 66899 - DNA, 80 bp, synthetic construct; identical to SEQ ID NO: 32698
  source 1..80: mol_type = other DNA

SEQ ID NO: 66900 - DNA, 80 bp, synthetic construct; identical to SEQ ID NO: 32699
  source 1..80: mol_type = other DNA

SEQ ID NO: 66901 - DNA, 80 bp, synthetic construct; identical to SEQ ID NO: 12063
  source 1..80: mol_type = other DNA

SEQ ID NO: 66902 - DNA, 80 bp, synthetic construct; identical to SEQ ID NO: 32701
  source 1..80: mol_type = other DNA

SEQ ID NO: 66903 - DNA, 80 bp, synthetic construct; identical to SEQ ID NO: 32702
  source 1..80: mol_type = other DNA

SEQ ID NO: 66904 - DNA, 80 bp, synthetic construct; identical to SEQ ID NO: 32703
  source 1..80: mol_type = other DNA

SEQ ID NO: 66905 - DNA, 80 bp, synthetic construct; identical to SEQ ID NO: 12064
  source 1..80: mol_type = other DNA

SEQ ID NO: 66906 - DNA, 80 bp, synthetic construct; identical to SEQ ID NO: 32705
  source 1..80: mol_type = other DNA

SEQ ID NO: 66907 - DNA, 80 bp, synthetic construct; identical to SEQ ID NO: 32706
  source 1..80: mol_type = other DNA

SEQ ID NO: 66908 - DNA, 80 bp, synthetic construct; identical to SEQ ID NO: 32707
  source 1..80: mol_type = other DNA

SEQ ID NO: 66909 - DNA, 80 bp, synthetic construct; identical to SEQ ID NO: 32708
  source 1..80: mol_type = other DNA

SEQ ID NO: 66910 - DNA, 80 bp, synthetic construct; identical to SEQ ID NO: 12065
  source 1..80: mol_type = other DNA

SEQ ID NO: 66911 - DNA, 80 bp, synthetic construct; identical to SEQ ID NO: 32710
  source 1..80: mol_type = other DNA

SEQ ID NO: 66912 - DNA, 80 bp, synthetic construct; identical to SEQ ID NO: 32711
  source 1..80: mol_type = other DNA

SEQ ID NO: 66913 - DNA, 80 bp, synthetic construct; identical to SEQ ID NO: 12066
  source 1..80: mol_type = other DNA

SEQ ID NO: 66914 - DNA, 80 bp, synthetic construct; identical to SEQ ID NO: 32713
  source 1..80: mol_type = other DNA

SEQ ID NO: 66915 - DNA, 80 bp, synthetic construct; identical to SEQ ID NO: 32714
  source 1..80: mol_type = other DNA

SEQ ID NO: 66916 - DNA, 80 bp, synthetic construct; identical to SEQ ID NO: 32715
  source 1..80: mol_type = other DNA

SEQ ID NO: 66917 - DNA, 80 bp, synthetic construct; identical to SEQ ID NO: 12067
  source 1..80: mol_type = other DNA

SEQ ID NO: 66918 - DNA, 80 bp, synthetic construct; identical to SEQ ID NO: 32717
  source 1..80: mol_type = other DNA

SEQ ID NO: 66919 - DNA, 80 bp, synthetic construct; identical to SEQ ID NO: 32718
  source 1..80: mol_type = other DNA

SEQ ID NO: 66920 - DNA, 80 bp, synthetic construct; identical to SEQ ID NO: 12068
  source 1..80: mol_type = other DNA

SEQ ID NO: 66921 - DNA, 80 bp, synthetic construct; identical to SEQ ID NO: 32721
  source 1..80: mol_type = other DNA

SEQ ID NO: 66922 - DNA, 80 bp, synthetic construct; identical to SEQ ID NO: 32722
  source 1..80: mol_type = other DNA

SEQ ID NO: 66923 - DNA, 80 bp, synthetic construct; identical to SEQ ID NO: 32723
  source 1..80: mol_type = other DNA

SEQ ID NO: 66924 - DNA, 80 bp, synthetic construct; identical to SEQ ID NO: 12069
  source 1..80: mol_type = other DNA

SEQ ID NO: 66925 - DNA, 80 bp, synthetic construct; identical to SEQ ID NO: 32725
  source 1..80: mol_type = other DNA

SEQ ID NO: 66926 - DNA, 80 bp, synthetic construct; identical to SEQ ID NO: 32726
  source 1..80: mol_type = other DNA

SEQ ID NO: 66927 - DNA, 80 bp, synthetic construct; identical to SEQ ID NO: 32727
  source 1..80: mol_type = other DNA

SEQ ID NO: 66928 - DNA, 80 bp, synthetic construct; identical to SEQ ID NO: 32728
  source 1..80: mol_type = other DNA

SEQ ID NO: 66929 - DNA, 80 bp, synthetic construct; identical to SEQ ID NO: 12070
  source 1..80: mol_type = other DNA

SEQ ID NO: 66930 - DNA, 80 bp, synthetic construct; identical to SEQ ID NO: 32730
  source 1..80: mol_type = other DNA

SEQ ID NO: 66931 - DNA, 80 bp, synthetic construct; identical to SEQ ID NO: 32731
  source 1..80: mol_type = other DNA

SEQ ID NO: 66932 - DNA, 80 bp, synthetic construct; identical to SEQ ID NO: 32732
  source 1..80: mol_type = other DNA

SEQ ID NO: 66933 - DNA, 80 bp, synthetic construct; identical to SEQ ID NO: 12071
  source 1..80: mol_type = other DNA

SEQ ID NO: 66934 - DNA, 80 bp, synthetic construct; identical to SEQ ID NO: 32734
  source 1..80: mol_type = other DNA

SEQ ID NO: 66935 - DNA, 80 bp, synthetic construct; identical to SEQ ID NO: 32735
  source 1..80: mol_type = other DNA

SEQ ID NO: 66936 - DNA, 80 bp, synthetic construct; identical to SEQ ID NO: 32736
  source 1..80: mol_type = other DNA

SEQ ID NO: 66937 - DNA, 80 bp, synthetic construct; identical to SEQ ID NO: 12072
  source 1..80: mol_type = other DNA

SEQ ID NO: 66938 - DNA, 80 bp, synthetic construct; identical to SEQ ID NO: 32738
  source 1..80: mol_type = other DNA

SEQ ID NO: 66939 - DNA, 80 bp, synthetic construct; identical to SEQ ID NO: 32739
  source 1..80: mol_type = other DNA

SEQ ID NO: 66940 - DNA, 80 bp, synthetic construct; identical to SEQ ID NO: 12073
  source 1..80: mol_type = other DNA

SEQ ID NO: 66941 - DNA, 80 bp, synthetic construct; identical to SEQ ID NO: 32741
  source 1..80: mol_type = other DNA

SEQ ID NO: 66942 - DNA, 80 bp, synthetic construct; identical to SEQ ID NO: 32742
  source 1..80: mol_type = other DNA

SEQ ID NO: 66943 - DNA, 80 bp, synthetic construct; identical to SEQ ID NO: 32743
  source 1..80: mol_type = other DNA

SEQ ID NO: 66944 - DNA, 80 bp, synthetic construct; identical to SEQ ID NO: 12074
  source 1..80: mol_type = other DNA

SEQ ID NO: 66945 - DNA, 80 bp, synthetic construct; identical to SEQ ID NO: 32745
  source 1..80: mol_type = other DNA

SEQ ID NO: 66946 - DNA, 80 bp, synthetic construct; identical to SEQ ID NO: 32746
  source 1..80: mol_type = other DNA

SEQ ID NO: 66947 - DNA, 80 bp, synthetic construct; identical to SEQ ID NO: 32747
  source 1..80: mol_type = other DNA

SEQ ID NO: 66948 - DNA, 80 bp, synthetic construct; identical to SEQ ID NO: 32748
  source 1..80: mol_type = other DNA

SEQ ID NO: 66949 - DNA, 80 bp, synthetic construct; identical to SEQ ID NO: 12075
  source 1..80: mol_type = other DNA

SEQ ID NO: 66950 - DNA, 80 bp, synthetic construct; identical to SEQ ID NO: 32750
  source 1..80: mol_type = other DNA

SEQ ID NO: 66951 - DNA, 80 bp, synthetic construct; identical to SEQ ID NO: 32751
  source 1..80: mol_type = other DNA

SEQ ID NO: 66952 - DNA, 80 bp, synthetic construct; identical to SEQ ID NO: 32752
  source 1..80: mol_type = other DNA

SEQ ID NO: 66953 - DNA, 80 bp, synthetic construct; identical to SEQ ID NO: 12076
  source 1..80: mol_type = other DNA

SEQ ID NO: 66954 - DNA, 80 bp, synthetic construct; identical to SEQ ID NO: 32754
  source 1..80: mol_type = other DNA

SEQ ID NO: 66955 - DNA, 80 bp, synthetic construct; identical to SEQ ID NO: 32755
  source 1..80: mol_type = other DNA

SEQ ID NO: 66956 - DNA, 80 bp, synthetic construct; identical to SEQ ID NO: 32756
  source 1..80: mol_type = other DNA

SEQ ID NO: 66957 - DNA, 80 bp, synthetic construct; identical to SEQ ID NO: 12077
  source 1..80: mol_type = other DNA

SEQ ID NO: 66958 - DNA, 80 bp, synthetic construct; identical to SEQ ID NO: 32758
  source 1..80: mol_type = other DNA

SEQ ID NO: 66959 - DNA, 80 bp, synthetic construct; identical to SEQ ID NO: 32759
  source 1..80: mol_type = other DNA

SEQ ID NO: 66960 - DNA, 80 bp, synthetic construct; identical to SEQ ID NO: 12078
  source 1..80: mol_type = other DNA

SEQ ID NO: 66961 - DNA, 80 bp, synthetic construct; identical to SEQ ID NO: 32761
  source 1..80: mol_type = other DNA

SEQ ID NO: 66962 - DNA, 80 bp, synthetic construct; identical to SEQ ID NO: 32762
  source 1..80: mol_type = other DNA

SEQ ID NO: 66963 - DNA, 80 bp, synthetic construct; identical to SEQ ID NO: 32763
  source 1..80: mol_type = other DNA

SEQ ID NO: 66964 - DNA, 80 bp, synthetic construct; identical to SEQ ID NO: 32764
  source 1..80: mol_type = other DNA

SEQ ID NO: 66965 - DNA, 80 bp, synthetic construct; identical to SEQ ID NO: 12079
  source 1..80: mol_type = other DNA

SEQ ID NO: 66966 - DNA, 80 bp, synthetic construct; identical to SEQ ID NO: 32766
  source 1..80: mol_type = other DNA

SEQ ID NO: 66967 - DNA, 80 bp, synthetic construct; identical to SEQ ID NO: 32767
  source 1..80: mol_type = other DNA

SEQ ID NO: 66968 - DNA, 80 bp, synthetic construct; identical to SEQ ID NO: 12080
  source 1..80: mol_type = other DNA

SEQ ID NO: 66969 - DNA, 80 bp, synthetic construct; identical to SEQ ID NO: 32769
  source 1..80: mol_type = other DNA

SEQ ID NO: 66970 - DNA, 80 bp, synthetic construct; identical to SEQ ID NO: 32770
  source 1..80: mol_type = other DNA

SEQ ID NO: 66971 - DNA, 80 bp, synthetic construct; identical to SEQ ID NO: 32771
  source 1..80: mol_type = other DNA

SEQ ID NO: 66972 - DNA, 80 bp, synthetic construct; identical to SEQ ID NO: 12081
  source 1..80: mol_type = other DNA

SEQ ID NO: 66973 - DNA, 80 bp, synthetic construct; identical to SEQ ID NO: 32773
  source 1..80: mol_type = other DNA

SEQ ID NO: 66974 - DNA, 80 bp, synthetic construct; identical to SEQ ID NO: 32775
  source 1..80: mol_type = other DNA

SEQ ID NO: 66975 - DNA, 80 bp, synthetic construct; identical to SEQ ID NO: 32776
  source 1..80: mol_type = other DNA

SEQ ID NO: 66976 - DNA, 80 bp, synthetic construct; identical to SEQ ID NO: 12082
  source 1..80: mol_type = other DNA

SEQ ID NO: 66977 - DNA, 80 bp, synthetic construct; identical to SEQ ID NO: 32778
  source 1..80: mol_type = other DNA

SEQ ID NO: 66978 - DNA, 80 bp, synthetic construct; identical to SEQ ID NO: 32779
  source 1..80: mol_type = other DNA

SEQ ID NO: 66979 - DNA, 80 bp, synthetic construct; identical to SEQ ID NO: 12083
  source 1..80: mol_type = other DNA

SEQ ID NO: 66980 - DNA, 80 bp, synthetic construct; identical to SEQ ID NO: 32782
  source 1..80: mol_type = other DNA

SEQ ID NO: 66981 - DNA, 80 bp, synthetic construct; identical to SEQ ID NO: 32783
  source 1..80: mol_type = other DNA

SEQ ID NO: 66982 - DNA, 80 bp, synthetic construct; identical to SEQ ID NO: 12084
  source 1..80: mol_type = other DNA

SEQ ID NO: 66983 - DNA, 80 bp, synthetic construct; identical to SEQ ID NO: 32785
  source 1..80: mol_type = other DNA

SEQ ID NO: 66984 - DNA, 80 bp, synthetic construct; identical to SEQ ID NO: 32786
  source 1..80: mol_type = other DNA

SEQ ID NO: 66985 - DNA, 80 bp, synthetic construct; identical to SEQ ID NO: 32787
  source 1..80: mol_type = other DNA

SEQ ID NO: 66986 - DNA, 80 bp, synthetic construct; identical to SEQ ID NO: 12085
  source 1..80: mol_type = other DNA

SEQ ID NO: 66987 - DNA, 80 bp, synthetic construct; identical to SEQ ID NO: 32789
  source 1..80: mol_type = other DNA

SEQ ID NO: 66988 - DNA, 80 bp, synthetic construct; identical to SEQ ID NO: 32790
  source 1..80: mol_type = other DNA

SEQ ID NO: 66989 - DNA, 80 bp, synthetic construct; identical to SEQ ID NO: 32791
  source 1..80: mol_type = other DNA

SEQ ID NO: 66990 - DNA, 80 bp, synthetic construct; identical to SEQ ID NO: 12086
  source 1..80: mol_type = other DNA

SEQ ID NO: 66991 - DNA, 80 bp, synthetic construct; identical to SEQ ID NO: 32793
  source 1..80: mol_type = other DNA

SEQ ID NO: 66992 - DNA, 80 bp, synthetic construct; identical to SEQ ID NO: 32794
  source 1..80: mol_type = other DNA

SEQ ID NO: 66993 - DNA, 80 bp, synthetic construct; identical to SEQ ID NO: 32795
  source 1..80: mol_type = other DNA

SEQ ID NO: 66994 - DNA, 80 bp, synthetic construct; identical to SEQ ID NO: 12087
  source 1..80: mol_type = other DNA

SEQ ID NO: 66995 - DNA, 80 bp, synthetic construct; identical to SEQ ID NO: 32797
  source 1..80: mol_type = other DNA

SEQ ID NO: 66996 - DNA, 80 bp, synthetic construct; identical to SEQ ID NO: 32798
  source 1..80: mol_type = other DNA

SEQ ID NO: 66997 - DNA, 80 bp, synthetic construct; identical to SEQ ID NO: 32799
  source 1..80: mol_type = other DNA

SEQ ID NO: 66998 - DNA, 80 bp, synthetic construct; identical to SEQ ID NO: 12088
  source 1..80: mol_type = other DNA

SEQ ID NO: 66999 - DNA, 80 bp, synthetic construct; identical to SEQ ID NO: 32801
  source 1..80: mol_type = other DNA

SEQ ID NO: 67000 - DNA, 80 bp, synthetic construct; identical to SEQ ID NO: 32802
  source 1..80: mol_type = other DNA

SEQ ID NO: 67001 - DNA, 80 bp, synthetic construct; identical to SEQ ID NO: 32803
  source 1..80: mol_type = other DNA

SEQ ID NO: 67002 - DNA, 80 bp, synthetic construct; identical to SEQ ID NO: 32804
  source 1..80: mol_type = other DNA

SEQ ID NO: 67003 - DNA, 80 bp, synthetic construct; identical to SEQ ID NO: 12089
  source 1..80: mol_type = other DNA

SEQ ID NO: 67004 - DNA, 80 bp, synthetic construct; identical to SEQ ID NO: 32806
  source 1..80: mol_type = other DNA

SEQ ID NO: 67005 - DNA, 80 bp, synthetic construct; identical to SEQ ID NO: 32807
  source 1..80: mol_type = other DNA

SEQ ID NO: 67006 - DNA, 80 bp, synthetic construct; identical to SEQ ID NO: 12090
  source 1..80: mol_type = other DNA

SEQ ID NO: 67007 - DNA, 80 bp, synthetic construct; identical to SEQ ID NO: 32809
  source 1..80: mol_type = other DNA

SEQ ID NO: 67008 - DNA, 80 bp, synthetic construct; identical to SEQ ID NO: 32810
  source 1..80: mol_type = other DNA

SEQ ID NO: 67009 - DNA, 80 bp, synthetic construct; identical to SEQ ID NO: 32811
  source 1..80: mol_type = other DNA

SEQ ID NO: 67010 - DNA, 80 bp, synthetic construct; identical to SEQ ID NO: 12091
  source 1..80: mol_type = other DNA

SEQ ID NO: 67011 - DNA, 80 bp, synthetic construct; identical to SEQ ID NO: 32813
  source 1..80: mol_type = other DNA

SEQ ID NO: 67012 - DNA, 80 bp, synthetic construct; identical to SEQ ID NO: 32814
  source 1..80: mol_type = other DNA

SEQ ID NO: 67013 - DNA, 80 bp, synthetic construct; identical to SEQ ID NO: 32815
  source 1..80: mol_type = other DNA

SEQ ID NO: 67014 - DNA, 80 bp, synthetic construct; identical to SEQ ID NO: 12092
  source 1..80: mol_type = other DNA

SEQ ID NO: 67015 - DNA, 80 bp, synthetic construct; identical to SEQ ID NO: 32817
  source 1..80: mol_type = other DNA

SEQ ID NO: 67016 - DNA, 80 bp, synthetic construct; identical to SEQ ID NO: 32818
  source 1..80: mol_type = other DNA

SEQ ID NO: 67017 - DNA, 80 bp, synthetic construct; identical to SEQ ID NO: 32819
  source 1..80: mol_type = other DNA

SEQ ID NO: 67018 - DNA, 80 bp, synthetic construct; identical to SEQ ID NO: 32820
  source 1..80: mol_type = other DNA

SEQ ID NO: 67019 - DNA, 80 bp, synthetic construct; identical to SEQ ID NO: 12093
  source 1..80: mol_type = other DNA

SEQ ID NO: 67020 - DNA, 80 bp, synthetic construct; identical to SEQ ID NO: 32822
  source 1..80: mol_type = other DNA

SEQ ID NO: 67021 - DNA, 80 bp, synthetic construct; identical to SEQ ID NO: 32823
  source 1..80: mol_type = other DNA

SEQ ID NO: 67022 - DNA, 80 bp, synthetic construct; identical to SEQ ID NO: 12094
  source 1..80: mol_type = other DNA

SEQ ID NO: 67023 - DNA, 80 bp, synthetic construct; identical to SEQ ID NO: 32825
  source 1..80: mol_type = other DNA

SEQ ID NO: 67024 - DNA, 80 bp, synthetic construct; identical to SEQ ID NO: 32826
  source 1..80: mol_type = other DNA

SEQ ID NO: 67025 - DNA, 80 bp, synthetic construct; identical to SEQ ID NO: 32827
  source 1..80: mol_type = other DNA

SEQ ID NO: 67026 - DNA, 80 bp, synthetic construct; identical to SEQ ID NO: 32828
  source 1..80: mol_type = other DNA

SEQ ID NO: 67027 - DNA, 80 bp, synthetic construct; identical to SEQ ID NO: 12095
  source 1..80: mol_type = other DNA

SEQ ID NO: 67028 - DNA, 80 bp, synthetic construct; identical to SEQ ID NO: 32830
  source 1..80: mol_type = other DNA

SEQ ID NO: 67029 - DNA, 80 bp, synthetic construct; identical to SEQ ID NO: 32831
  source 1..80: mol_type = other DNA

SEQ ID NO: 67030 - DNA, 80 bp, synthetic construct; identical to SEQ ID NO: 32832
  source 1..80: mol_type = other DNA

SEQ ID NO: 67031 - DNA, 80 bp, synthetic construct; identical to SEQ ID NO: 12096
  source 1..80: mol_type = other DNA

SEQ ID NO: 67032 - DNA, 80 bp, synthetic construct; identical to SEQ ID NO: 32834
  source 1..80: mol_type = other DNA

SEQ ID NO: 67033 - DNA, 80 bp, synthetic construct; identical to SEQ ID NO: 32835
  source 1..80: mol_type = other DNA

SEQ ID NO: 67034 - DNA, 80 bp, synthetic construct; identical to SEQ ID NO: 12097
  source 1..80: mol_type = other DNA

SEQ ID NO: 67035 - DNA, 80 bp, synthetic construct; identical to SEQ ID NO: 32837
  source 1..80: mol_type = other DNA

SEQ ID NO: 67036 - DNA, 80 bp, synthetic construct; identical to SEQ ID NO: 32838
  source 1..80: mol_type = other DNA

SEQ ID NO: 67037 - DNA, 80 bp, synthetic construct; identical to SEQ ID NO: 32839
  source 1..80: mol_type = other DNA

SEQ ID NO: 67038 - DNA, 80 bp, synthetic construct; identical to SEQ ID NO: 12098
  source 1..80: mol_type = other DNA

SEQ ID NO: 67039 - DNA, 80 bp, synthetic construct; identical to SEQ ID NO: 32841
  source 1..80: mol_type = other DNA

SEQ ID NO: 67040 - DNA, 80 bp, synthetic construct; identical to SEQ ID NO: 32842
  source 1..80: mol_type = other DNA

SEQ ID NO: 67041 - DNA, 80 bp, synthetic construct; identical to SEQ ID NO: 32843
  source 1..80: mol_type = other DNA

SEQ ID NO: 67042 - DNA, 80 bp, synthetic construct; identical to SEQ ID NO: 32844
  source 1..80: mol_type = other DNA

SEQ ID NO: 67043 - DNA, 80 bp, synthetic construct; identical to SEQ ID NO: 12099
  source 1..80: mol_type = other DNA

SEQ ID NO: 67044 - DNA, 80 bp, synthetic construct; identical to SEQ ID NO: 32846
  source 1..80: mol_type = other DNA

SEQ ID NO: 67045 - DNA, 80 bp, synthetic construct; identical to SEQ ID NO: 32847
  source 1..80: mol_type = other DNA

SEQ ID NO: 67046 - DNA, 80 bp, synthetic construct; identical to SEQ ID NO: 32848
  source 1..80: mol_type = other DNA

SEQ ID NO: 67047 - DNA, 80 bp, synthetic construct; identical to SEQ ID NO: 12100
  source 1..80: mol_type = other DNA

SEQ ID NO: 67048 - DNA, 80 bp, synthetic construct; identical to SEQ ID NO: 32850
  source 1..80: mol_type = other DNA

SEQ ID NO: 67049 - DNA, 80 bp, synthetic construct; identical to SEQ ID NO: 32851
  source 1..80: mol_type = other DNA

SEQ ID NO: 67050 - DNA, 80 bp, synthetic construct; identical to SEQ ID NO: 12101
  source 1..80: mol_type = other DNA

SEQ ID NO: 67051 - DNA, 80 bp, synthetic construct; identical to SEQ ID NO: 32853
  source 1..80: mol_type = other DNA

SEQ ID NO: 67052 - DNA, 80 bp, synthetic construct; identical to SEQ ID NO: 32854
  source 1..80: mol_type = other DNA

SEQ ID NO: 67053 - DNA, 80 bp, synthetic construct; identical to SEQ ID NO: 32855
  source 1..80: mol_type = other DNA

SEQ ID NO: 67054 - DNA, 80 bp, synthetic construct; identical to SEQ ID NO: 32856
  source 1..80: mol_type = other DNA

SEQ ID NO: 67055 - DNA, 80 bp, synthetic construct; identical to SEQ ID NO: 12102
  source 1..80: mol_type = other DNA

SEQ ID NO: 67056 - DNA, 80 bp, synthetic construct; identical to SEQ ID NO: 32858
  source 1..80: mol_type = other DNA

SEQ ID NO: 67057 - DNA, 80 bp, synthetic construct; identical to SEQ ID NO: 32859
  source 1..80: mol_type = other DNA

SEQ ID NO: 67058 - DNA, 80 bp, synthetic construct; identical to SEQ ID NO: 32860
  source 1..80: mol_type = other DNA

SEQ ID NO: 67059 - DNA, 80 bp, synthetic construct; identical to SEQ ID NO: 12103
  source 1..80: mol_type = other DNA

SEQ ID NO: 67060 - DNA, 80 bp, synthetic construct; identical to SEQ ID NO: 32862
  source 1..80: mol_type = other DNA

SEQ ID NO: 67061 - DNA, 80 bp, synthetic construct; identical to SEQ ID NO: 12104
  source 1..80: mol_type = other DNA

SEQ ID NO: 67062 - DNA, 80 bp, synthetic construct; identical to SEQ ID NO: 32865
  source 1..80: mol_type = other DNA

SEQ ID NO: 67063 - DNA, 80 bp, synthetic construct; identical to SEQ ID NO: 32866
  source 1..80: mol_type = other DNA

SEQ ID NO: 67064 - DNA, 80 bp, synthetic construct; identical to SEQ ID NO: 32867
  source 1..80: mol_type = other DNA

SEQ ID NO: 67065 - DNA, 80 bp, synthetic construct; identical to SEQ ID NO: 12105
  source 1..80: mol_type = other DNA

SEQ ID NO: 67066 - DNA, 80 bp, synthetic construct; identical to SEQ ID NO: 32869
  source 1..80: mol_type = other DNA

SEQ ID NO: 67067 - DNA, 80 bp, synthetic construct; identical to SEQ ID NO: 32870
  source 1..80: mol_type = other DNA

SEQ ID NO: 67068 - DNA, 80 bp, synthetic construct; identical to SEQ ID NO: 32871
  source 1..80: mol_type = other DNA

SEQ ID NO: 67069 - DNA, 80 bp, synthetic construct; identical to SEQ ID NO: 12106
  source 1..80: mol_type = other DNA

SEQ ID NO: 67070 - DNA, 80 bp, synthetic construct; identical to SEQ ID NO: 32874
  source 1..80: mol_type = other DNA

SEQ ID NO: 67071 - DNA, 80 bp, synthetic construct; identical to SEQ ID NO: 32875
  source 1..80: mol_type = other DNA

SEQ ID NO: 67072 - DNA, 80 bp, synthetic construct; identical to SEQ ID NO: 12107
  source 1..80: mol_type = other DNA

SEQ ID NO: 67073 - DNA, 80 bp, synthetic construct; identical to SEQ ID NO: 32877
  source 1..80: mol_type = other DNA

SEQ ID NO: 67074 - DNA, 80 bp, synthetic construct; identical to SEQ ID NO: 32878
  source 1..80: mol_type = other DNA

SEQ ID NO: 67075 - DNA, 80 bp, synthetic construct; identical to SEQ ID NO: 32879
  source 1..80: mol_type = other DNA

SEQ ID NO: 67076 - DNA, 80 bp, synthetic construct; identical to SEQ ID NO: 12108
  source 1..80: mol_type = other DNA

SEQ ID NO: 67077 - DNA, 80 bp, synthetic construct; identical to SEQ ID NO: 32881
  source 1..80: mol_type = other DNA

SEQ ID NO: 67078 - DNA, 80 bp, synthetic construct; identical to SEQ ID NO: 32882
  source 1..80: mol_type = other DNA

SEQ ID NO: 67079 - DNA, 80 bp, synthetic construct; identical to SEQ ID NO: 32883
  source 1..80: mol_type = other DNA

SEQ ID NO: 67080 - DNA, 80 bp, synthetic construct; identical to SEQ ID NO: 12109
  source 1..80: mol_type = other DNA

SEQ ID NO: 67081 - DNA, 80 bp, synthetic construct; identical to SEQ ID NO: 32885
  source 1..80: mol_type = other DNA

SEQ ID NO: 67082 - DNA, 80 bp, synthetic construct; identical to SEQ ID NO: 32886
  source 1..80: mol_type = other DNA

SEQ ID NO: 67083 - DNA, 80 bp, synthetic construct; identical to SEQ ID NO: 32887
  source 1..80: mol_type = other DNA

SEQ ID NO: 67084 - DNA, 80 bp, synthetic construct; identical to SEQ ID NO: 12110
  source 1..80: mol_type = other DNA

SEQ ID NO: 67085 - DNA, 80 bp, synthetic construct; identical to SEQ ID NO: 32889
  source 1..80: mol_type = other DNA

SEQ ID NO: 67086 - DNA, 80 bp, synthetic construct; identical to SEQ ID NO: 32890
  source 1..80: mol_type = other DNA

SEQ ID NO: 67087 - DNA, 80 bp, synthetic construct; identical to SEQ ID NO: 32891
  source 1..80: mol_type = other DNA

SEQ ID NO: 67088 - DNA, 80 bp, synthetic construct; identical to SEQ ID NO: 12111
  source 1..80: mol_type = other DNA

SEQ ID NO: 67089 - DNA, 80 bp, synthetic construct; identical to SEQ ID NO: 32893
  source 1..80: mol_type = other DNA

SEQ ID NO: 67090 - DNA, 80 bp, synthetic construct; identical to SEQ ID NO: 32894
  source 1..80: mol_type = other DNA

SEQ ID NO: 67091 - DNA, 80 bp, synthetic construct; identical to SEQ ID NO: 32896
  source 1..80: mol_type = other DNA

SEQ ID NO: 67092 - DNA, 80 bp, synthetic construct; identical to SEQ ID NO: 32898
  source 1..80: mol_type = other DNA

SEQ ID NO: 67093 - DNA, 80 bp, synthetic construct; identical to SEQ ID NO: 32899
  source 1..80: mol_type = other DNA

SEQ ID NO: 67094 - DNA, 80 bp, synthetic construct; identical to SEQ ID NO: 32900
  source 1..80: mol_type = other DNA

SEQ ID NO: 67095 - DNA, 80 bp, synthetic construct; identical to SEQ ID NO: 32901
  source 1..80: mol_type = other DNA

SEQ ID NO: 67096 - DNA, 80 bp, synthetic construct; identical to SEQ ID NO: 12113
  source 1..80: mol_type = other DNA

SEQ ID NO: 67097 - DNA, 80 bp, synthetic construct; identical to SEQ ID NO: 32903
  source 1..80: mol_type = other DNA

SEQ ID NO: 67098 - DNA, 80 bp, synthetic construct; identical to SEQ ID NO: 32904
  source 1..80: mol_type = other DNA

SEQ ID NO: 67099 - DNA, 80 bp, synthetic construct; identical to SEQ ID NO: 32905
  source 1..80: mol_type = other DNA

SEQ ID NO: 67100 - DNA, 80 bp, synthetic construct; identical to SEQ ID NO: 12114
  source 1..80: mol_type = other DNA

SEQ ID NO: 67101 - DNA, 80 bp, synthetic construct; identical to SEQ ID NO: 32907
  source 1..80: mol_type = other DNA

SEQ ID NO: 67102 - DNA, 80 bp, synthetic construct; identical to SEQ ID NO: 32908
  source 1..80: mol_type = other DNA

SEQ ID NO: 67103 - DNA, 80 bp, synthetic construct; identical to SEQ ID NO: 32909
  source 1..80: mol_type = other DNA

SEQ ID NO: 67104 - DNA, 80 bp, synthetic construct; identical to SEQ ID NO: 12115
  source 1..80: mol_type = other DNA

SEQ ID NO: 67105 - DNA, 80 bp, synthetic construct; identical to SEQ ID NO: 32911
  source 1..80: mol_type = other DNA

SEQ ID NO: 67106 - DNA, 80 bp, synthetic construct; identical to SEQ ID NO: 32912
  source 1..80: mol_type = other DNA

SEQ ID NO: 67107 - DNA, 80 bp, synthetic construct; identical to SEQ ID NO: 32913
  source 1..80: mol_type = other DNA

SEQ ID NO: 67108 - DNA, 80 bp, synthetic construct; identical to SEQ ID NO: 12116
  source 1..80: mol_type = other DNA

SEQ ID NO: 67109 - DNA, 80 bp, synthetic construct; identical to SEQ ID NO: 32915
  source 1..80: mol_type = other DNA

SEQ ID NO: 67110 - DNA, 80 bp, synthetic construct; identical to SEQ ID NO: 32916
  source 1..80: mol_type = other DNA

SEQ ID NO: 67111 - DNA, 80 bp, synthetic construct; identical to SEQ ID NO: 32917
  source 1..80: mol_type = other DNA

SEQ ID NO: 67112 - DNA, 80 bp, synthetic construct; identical to SEQ ID NO: 12112
  source 1..80: mol_type = other DNA

SEQ ID NO: 67113 - DNA, 80 bp, synthetic construct; identical to SEQ ID NO: 32921
  source 1..80: mol_type = other DNA

SEQ ID NO: 67114 - DNA, 80 bp, synthetic construct; identical to SEQ ID NO: 32923
  source 1..80: mol_type = other DNA

SEQ ID NO: 67115 - DNA, 80 bp, synthetic construct; identical to SEQ ID NO: 32925
  source 1..80: mol_type = other DNA

SEQ ID NO: 67116 - DNA, 80 bp, synthetic construct; identical to SEQ ID NO: 12119
  source 1..80: mol_type = other DNA

SEQ ID NO: 67117 - DNA, 80 bp, synthetic construct; identical to SEQ ID NO: 32927
  source 1..80: mol_type = other DNA

SEQ ID NO: 67118 - DNA, 80 bp, synthetic construct; identical to SEQ ID NO: 32928
  source 1..80: mol_type = other DNA

SEQ ID NO: 67119 - DNA, 80 bp, synthetic construct; identical to SEQ ID NO: 12120
  source 1..80: mol_type = other DNA

SEQ ID NO: 67120 - DNA, 80 bp, synthetic construct; identical to SEQ ID NO: 32931
  source 1..80: mol_type = other DNA

SEQ ID NO: 67121 - DNA, 80 bp, synthetic construct; identical to SEQ ID NO: 32932
  source 1..80: mol_type = other DNA

SEQ ID NO: 67122 - DNA, 80 bp, synthetic construct; identical to SEQ ID NO: 32933
  source 1..80: mol_type = other DNA

SEQ ID NO: 67123 - DNA, 80 bp, synthetic construct; identical to SEQ ID NO: 12121
  source 1..80: mol_type = other DNA

SEQ ID NO: 67124 - DNA, 80 bp, synthetic construct; identical to SEQ ID NO: 32935
  source 1..80: mol_type = other DNA

SEQ ID NO: 67125 - DNA, 80 bp, synthetic construct; identical to SEQ ID NO: 32936
  source 1..80: mol_type = other DNA

SEQ ID NO: 67126 - DNA, 80 bp, synthetic construct; identical to SEQ ID NO: 12122
  source 1..80: mol_type = other DNA

SEQ ID NO: 67127 - DNA, 80 bp, synthetic construct; identical to SEQ ID NO: 32939
  source 1..80: mol_type = other DNA

SEQ ID NO: 67128 - DNA, 80 bp, synthetic construct; identical to SEQ ID NO: 32940
  source 1..80: mol_type = other DNA

SEQ ID NO: 67129 - DNA, 80 bp, synthetic construct; identical to SEQ ID NO: 32941
  source 1..80: mol_type = other DNA

SEQ ID NO: 67130 - DNA, 80 bp, synthetic construct; identical to SEQ ID NO: 12123
  source 1..80: mol_type = other DNA

SEQ ID NO: 67131 - DNA, 80 bp, synthetic construct; identical to SEQ ID NO: 32943
  source 1..80: mol_type = other DNA

SEQ ID NO: 67132 - DNA, 80 bp, synthetic construct; identical to SEQ ID NO: 32944
  source 1..80: mol_type = other DNA

SEQ ID NO: 67133 - DNA, 80 bp, synthetic construct; identical to SEQ ID NO: 32945
  source 1..80: mol_type = other DNA

SEQ ID NO: 67134 - DNA, 80 bp, synthetic construct; identical to SEQ ID NO: 12124
  source 1..80: mol_type = other DNA

SEQ ID NO: 67135 - DNA, 80 bp, synthetic construct; identical to SEQ ID NO: 32947
  source 1..80: mol_type = other DNA

SEQ ID NO: 67136 - DNA, 80 bp, synthetic construct; identical to SEQ ID NO: 32948
  source 1..80: mol_type = other DNA

SEQ ID NO: 67137 - DNA, 80 bp, synthetic construct; identical to SEQ ID NO: 12125
  source 1..80: mol_type = other DNA

SEQ ID NO: 67138 - DNA, 80 bp, synthetic construct; identical to SEQ ID NO: 32951
  source 1..80: mol_type = other DNA

SEQ ID NO: 67139 - DNA, 80 bp, synthetic construct; identical to SEQ ID NO: 32952
  source 1..80: mol_type = other DNA

SEQ ID NO: 67140 - DNA, 80 bp, synthetic construct; identical to SEQ ID NO: 32953
  source 1..80: mol_type = other DNA

SEQ ID NO: 67141 - DNA, 80 bp, synthetic construct; identical to SEQ ID NO: 12126
  source 1..80: mol_type = other DNA

SEQ ID NO: 67142 - DNA, 80 bp, synthetic construct; identical to SEQ ID NO: 32955
  source 1..80: mol_type = other DNA

SEQ ID NO: 67143 - DNA, 80 bp, synthetic construct; identical to SEQ ID NO: 32956
  source 1..80: mol_type = other DNA

SEQ ID NO: 67144 - DNA, 80 bp, synthetic construct; identical to SEQ ID NO: 12127
  source 1..80: mol_type = other DNA

SEQ ID NO: 67145 - DNA, 80 bp, synthetic construct; identical to SEQ ID NO: 32959
  source 1..80: mol_type = other DNA

SEQ ID NO: 67146 - DNA, 80 bp, synthetic construct; identical to SEQ ID NO: 32960
  source 1..80: mol_type = other DNA

SEQ ID NO: 67147 - DNA, 80 bp, synthetic construct; identical to SEQ ID NO: 12128
  source 1..80: mol_type = other DNA

SEQ ID NO: 67148 - DNA, 80 bp, synthetic construct; identical to SEQ ID NO: 32962
  source 1..80: mol_type = other DNA

SEQ ID NO: 67149 - DNA, 80 bp, synthetic construct; identical to SEQ ID NO: 32963
  source 1..80: mol_type = other DNA

SEQ ID NO: 67150 - DNA, 80 bp, synthetic construct; identical to SEQ ID NO: 32964
  source 1..80: mol_type = other DNA

SEQ ID NO: 67151 - DNA, 80 bp, synthetic construct; identical to SEQ ID NO: 32965
  source 1..80: mol_type = other DNA

SEQ ID NO: 67152 - DNA, 80 bp, synthetic construct; identical to SEQ ID NO: 12129
  source 1..80: mol_type = other DNA

SEQ ID NO: 67153 - DNA, 80 bp, synthetic construct; identical to SEQ ID NO: 32967
  source 1..80: mol_type = other DNA

SEQ ID NO: 67154 - DNA, 80 bp, synthetic construct; identical to SEQ ID NO: 32968
  source 1..80: mol_type = other DNA

SEQ ID NO: 67155 - DNA, 80 bp, synthetic construct; identical to SEQ ID NO: 32969
  source 1..80: mol_type = other DNA

SEQ ID NO: 67156 - DNA, 80 bp, synthetic construct; identical to SEQ ID NO: 32970
  source 1..80: mol_type = other DNA

SEQ ID NO: 67157 - DNA, 80 bp, synthetic construct; identical to SEQ ID NO: 32971
  source 1..80: mol_type = other DNA

SEQ ID NO: 67158 - DNA, 80 bp, synthetic construct; identical to SEQ ID NO: 32972
  source 1..80: mol_type = other DNA

SEQ ID NO: 67159 - DNA, 80 bp, synthetic construct; identical to SEQ ID NO: 32973
  source 1..80: mol_type = other DNA

SEQ ID NO: 67160 - DNA, 80 bp, synthetic construct; identical to SEQ ID NO: 12130
  source 1..80: mol_type = other DNA

SEQ ID NO: 67161 - DNA, 80 bp, synthetic construct; identical to SEQ ID NO: 32975
  source 1..80: mol_type = other DNA

SEQ ID NO: 67162 - DNA, 80 bp, synthetic construct; identical to SEQ ID NO: 32976
  source 1..80: mol_type = other DNA

SEQ ID NO: 67163 - DNA, 80 bp, synthetic construct; identical to SEQ ID NO: 32977
  source 1..80: mol_type = other DNA

SEQ ID NO: 67164 - DNA, 80 bp, synthetic construct; identical to SEQ ID NO: 32978
  source 1..80: mol_type = other DNA

SEQ ID NO: 67165 - DNA, 80 bp, synthetic construct; identical to SEQ ID NO: 12131
  source 1..80: mol_type = other DNA

SEQ ID NO: 67166 - DNA, 80 bp, synthetic construct; identical to SEQ ID NO: 32980
  source 1..80: mol_type = other DNA

SEQ ID NO: 67167 - DNA, 80 bp, synthetic construct; identical to SEQ ID NO: 32981
  source 1..80: mol_type = other DNA

SEQ ID NO: 67168 - DNA, 80 bp, synthetic construct; identical to SEQ ID NO: 12132
  source 1..80: mol_type = other DNA

SEQ ID NO: 67169 - DNA, 80 bp, synthetic construct; identical to SEQ ID NO: 32983
  source 1..80: mol_type = other DNA

SEQ ID NO: 67170 - DNA, 80 bp, synthetic construct; identical to SEQ ID NO: 32984
  source 1..80: mol_type = other DNA

SEQ ID NO: 67171 - DNA, 80 bp, synthetic construct; identical to SEQ ID NO: 32985
  source 1..80: mol_type = other DNA

SEQ ID NO: 67172 - DNA, 80 bp, synthetic construct; identical to SEQ ID NO: 32986
  source 1..80: mol_type = other DNA

SEQ ID NO: 67173 - DNA, 80 bp, synthetic construct; identical to SEQ ID NO: 12133
  source 1..80: mol_type = other DNA

SEQ ID NO: 67174 - DNA, 80 bp, synthetic construct; identical to SEQ ID NO: 32988
  source 1..80: mol_type = other DNA

SEQ ID NO: 67175 - DNA, 80 bp, synthetic construct; identical to SEQ ID NO: 32989
  source 1..80: mol_type = other DNA

SEQ ID NO: 67176 - DNA, 80 bp, synthetic construct; identical to SEQ ID NO: 12134
  source 1..80: mol_type = other DNA

SEQ ID NO: 67177 - DNA, 80 bp, synthetic construct; identical to SEQ ID NO: 32991
  source 1..80: mol_type = other DNA

SEQ ID NO: 67178 - DNA, 80 bp, synthetic construct; identical to SEQ ID NO: 32992
  source 1..80: mol_type = other DNA

SEQ ID NO: 67179 - DNA, 80 bp, synthetic construct; identical to SEQ ID NO: 32993
  source 1..80: mol_type = other DNA

SEQ ID NO: 67180 - DNA, 80 bp, synthetic construct; identical to SEQ ID NO: 32994
  source 1..80: mol_type = other DNA

SEQ ID NO: 67181 - DNA, 80 bp, synthetic construct; identical to SEQ ID NO: 32995
  source 1..80: mol_type = other DNA

SEQ ID NO: 67182 - DNA, 80 bp, synthetic construct; identical to SEQ ID NO: 12135
  source 1..80: mol_type = other DNA

SEQ ID NO: 67183 - DNA, 80 bp, synthetic construct; identical to SEQ ID NO: 32997
  source 1..80: mol_type = other DNA

SEQ ID NO: 67184 - DNA, 80 bp, synthetic construct; identical to SEQ ID NO: 32998
  source 1..80: mol_type = other DNA

SEQ ID NO: 67185 - DNA, 80 bp, synthetic construct; identical to SEQ ID NO: 12136
  source 1..80: mol_type = other DNA

SEQ ID NO: 67186 - DNA, 80 bp, synthetic construct; identical to SEQ ID NO: 33000
  source 1..80: mol_type = other DNA

SEQ ID NO: 67187 - DNA, 80 bp, synthetic construct; identical to SEQ ID NO: 33001
  source 1..80: mol_type = other DNA

SEQ ID NO: 67188 - DNA, 80 bp, synthetic construct; identical to SEQ ID NO: 33002
  source 1..80: mol_type = other DNA

SEQ ID NO: 67189 - DNA, 80 bp, synthetic construct; identical to SEQ ID NO: 33003
  source 1..80: mol_type = other DNA

SEQ ID NO: 67190 - DNA, 80 bp, synthetic construct; identical to SEQ ID NO: 12137
  source 1..80: mol_type = other DNA

SEQ ID NO: 67191 - DNA, 80 bp, synthetic construct; identical to SEQ ID NO: 33005
  source 1..80: mol_type = other DNA

SEQ ID NO: 67192 - DNA, 80 bp, synthetic construct; identical to SEQ ID NO: 33006
  source 1..80: mol_type = other DNA

SEQ ID NO: 67193 - DNA, 80 bp, synthetic construct; identical to SEQ ID NO: 33007
  source 1..80: mol_type = other DNA

SEQ ID NO: 67194 - DNA, 80 bp, synthetic construct; identical to SEQ ID NO: 12138
  source 1..80: mol_type = other DNA

SEQ ID NO: 67195 - DNA, 80 bp, synthetic construct; identical to SEQ ID NO: 33009
  source 1..80: mol_type = other DNA

SEQ ID NO: 67196 - DNA, 80 bp, synthetic construct; identical to SEQ ID NO: 33010
  source 1..80: mol_type = other DNA

SEQ ID NO: 67197 - DNA, 80 bp, synthetic construct; identical to SEQ ID NO: 12139
  source 1..80: mol_type = other DNA

SEQ ID NO: 67198 - DNA, 80 bp, synthetic construct; identical to SEQ ID NO: 33012
  source 1..80: mol_type = other DNA

SEQ ID NO: 67199 - DNA, 80 bp, synthetic construct; identical to SEQ ID NO: 33013
  source 1..80: mol_type = other DNA

SEQ ID NO: 67200 - DNA, 80 bp, synthetic construct; identical to SEQ ID NO: 33014
  source 1..80: mol_type = other DNA

SEQ ID NO: 67201 - DNA, 80 bp, synthetic construct; identical to SEQ ID NO: 12140
  source 1..80: mol_type = other DNA

SEQ ID NO: 67202 - DNA, 80 bp, synthetic construct; identical to SEQ ID NO: 33016
  source 1..80: mol_type = other DNA

SEQ ID NO: 67203 - DNA, 80 bp, synthetic construct; identical to SEQ ID NO: 33017
  source 1..80: mol_type = other DNA

SEQ ID NO: 67204 - DNA, 80 bp, synthetic construct; identical to SEQ ID NO: 33018
  source 1..80: mol_type = other DNA

SEQ ID NO: 67205 - DNA, 80 bp, synthetic construct; identical to SEQ ID NO: 33019
  source 1..80: mol_type = other DNA

SEQ ID NO: 67206 - DNA, 80 bp, synthetic construct; identical to SEQ ID NO: 12141
  source 1..80: mol_type = other DNA

SEQ ID NO: 67207 - DNA, 80 bp, synthetic construct; identical to SEQ ID NO: 33021
  source 1..80: mol_type = other DNA

SEQ ID NO: 67208 - DNA, 80 bp, synthetic construct; identical to SEQ ID NO: 33022
  source 1..80: mol_type = other DNA

SEQ ID NO: 67209 - DNA, 80 bp, synthetic construct; identical to SEQ ID NO: 33023
  source 1..80: mol_type = other DNA

SEQ ID NO: 67210 - DNA, 80 bp, synthetic construct; identical to SEQ ID NO: 12142
  source 1..80: mol_type = other DNA

SEQ ID NO: 67211 - DNA, 80 bp, synthetic construct; identical to SEQ ID NO: 33025
  source 1..80: mol_type = other DNA

SEQ ID NO: 67212 - DNA, 80 bp, synthetic construct; identical to SEQ ID NO: 33026
  source 1..80: mol_type = other DNA

SEQ ID NO: 67213 - DNA, 80 bp, synthetic construct; identical to SEQ ID NO: 12143
  source 1..80: mol_type = other DNA

SEQ ID NO: 67214 - DNA, 80 bp, synthetic construct; identical to SEQ ID NO: 33028
  source 1..80: mol_type = other DNA

SEQ ID NO: 67215 - DNA, 80 bp, synthetic construct; identical to SEQ ID NO: 33029
  source 1..80: mol_type = other DNA

SEQ ID NO: 67216 - DNA, 80 bp, synthetic construct; identical to SEQ ID NO: 12144
  source 1..80: mol_type = other DNA

SEQ ID NO: 67217 - DNA, 80 bp, synthetic construct; identical to SEQ ID NO: 33032
  source 1..80: mol_type = other DNA

SEQ ID NO: 67218 - DNA, 80 bp, synthetic construct; identical to SEQ ID NO: 33033
  source 1..80: mol_type = other DNA

SEQ ID NO: 67219 - DNA, 80 bp, synthetic construct; identical to SEQ ID NO: 33034
  source 1..80: mol_type = other DNA

SEQ ID NO: 67220 - DNA, 80 bp, synthetic construct; identical to SEQ ID NO: 12145
  source 1..80: mol_type = other DNA

SEQ ID NO: 67221 - DNA, 80 bp, synthetic construct; identical to SEQ ID NO: 33036
  source 1..80: mol_type = other DNA

SEQ ID NO: 67222 - DNA, 80 bp, synthetic construct; identical to SEQ ID NO: 33037
  source 1..80: mol_type = other DNA

SEQ ID NO: 67223 - DNA, 80 bp, synthetic construct; identical to SEQ ID NO: 33038
  source 1..80: mol_type = other DNA

SEQ ID NO: 67224 - DNA, 80 bp, synthetic construct; identical to SEQ ID NO: 12146
  source 1..80: mol_type = other DNA

SEQ ID NO: 67225 - DNA, 80 bp, synthetic construct; identical to SEQ ID NO: 33040
  source 1..80: mol_type = other DNA

SEQ ID NO: 67226 - DNA, 80 bp, synthetic construct; identical to SEQ ID NO: 33041
  source 1..80: mol_type = other DNA

SEQ ID NO: 67227 - DNA, 80 bp, synthetic construct; identical to SEQ ID NO: 33042
  source 1..80: mol_type = other DNA

SEQ ID NO: 67228 - DNA, 80 bp, synthetic construct; identical to SEQ ID NO: 33043
  source 1..80: mol_type = other DNA

SEQ ID NO: 67229 - DNA, 80 bp, synthetic construct; identical to SEQ ID NO: 12147
  source 1..80: mol_type = other DNA

SEQ ID NO: 67230 - DNA, 80 bp, synthetic construct; identical to SEQ ID NO: 33045
  source 1..80: mol_type = other DNA

SEQ ID NO: 67231 - DNA, 80 bp, synthetic construct; identical to SEQ ID NO: 33046
  source 1..80: mol_type = other DNA

SEQ ID NO: 67232 - DNA, 80 bp, synthetic construct; identical to SEQ ID NO: 12148
  source 1..80: mol_type = other DNA

SEQ ID NO: 67233 - DNA, 80 bp, synthetic construct; identical to SEQ ID NO: 33048
  source 1..80: mol_type = other DNA

SEQ ID NO: 67234 - DNA, 80 bp, synthetic construct; identical to SEQ ID NO: 33049
  source 1..80: mol_type = other DNA

SEQ ID NO: 67235 - DNA, 80 bp, synthetic construct; identical to SEQ ID NO: 33050
  source 1..80: mol_type = other DNA

SEQ ID NO: 67236 - DNA, 80 bp, synthetic construct; identical to SEQ ID NO: 33051
  source 1..80: mol_type = other DNA

SEQ ID NO: 67237 - DNA, 80 bp, synthetic construct; identical to SEQ ID NO: 12149
  source 1..80: mol_type = other DNA

SEQ ID NO: 67238 - DNA, 80 bp, synthetic construct; identical to SEQ ID NO: 33053
  source 1..80: mol_type = other DNA

SEQ ID NO: 67239 - DNA, 80 bp, synthetic construct; identical to SEQ ID NO: 33054
  source 1..80: mol_type = other DNA

SEQ ID NO: 67240 - DNA, 80 bp, synthetic construct; identical to SEQ ID NO: 33055
  source 1..80: mol_type = other DNA

SEQ ID NO: 67241 - DNA, 80 bp, synthetic construct; identical to SEQ ID NO: 12150
  source 1..80: mol_type = other DNA

SEQ ID NO: 67242 - DNA, 80 bp, synthetic construct; identical to SEQ ID NO: 33057
  source 1..80: mol_type = other DNA

SEQ ID NO: 67243 - DNA, 80 bp, synthetic construct; identical to SEQ ID NO: 33058
  source 1..80: mol_type = other DNA

SEQ ID NO: 67244 - DNA, 80 bp, synthetic construct; identical to SEQ ID NO: 12151
  source 1..80: mol_type = other DNA

SEQ ID NO: 67245 - DNA, 80 bp, synthetic construct; identical to SEQ ID NO: 33060
  source 1..80: mol_type = other DNA

SEQ ID NO: 67246 - DNA, 80 bp, synthetic construct; identical to SEQ ID NO: 33061
  source 1..80: mol_type = other DNA

SEQ ID NO: 67247 - DNA, 80 bp, synthetic construct; identical to SEQ ID NO: 33062
  source 1..80: mol_type = other DNA

SEQ ID NO: 67248 - DNA, 80 bp, synthetic construct; identical to SEQ ID NO: 33063
  source 1..80: mol_type = other DNA

SEQ ID NO: 67249 - DNA, 80 bp, synthetic construct; identical to SEQ ID NO: 12152
  source 1..80: mol_type = other DNA

SEQ ID NO: 67250 - DNA, 80 bp, synthetic construct; identical to SEQ ID NO: 33065
  source 1..80: mol_type = other DNA

SEQ ID NO: 67251 - DNA, 80 bp, synthetic construct; identical to SEQ ID NO: 33066
  source 1..80: mol_type = other DNA

SEQ ID NO: 67252 - DNA, 80 bp, synthetic construct; identical to SEQ ID NO: 33067
  source 1..80: mol_type = other DNA

SEQ ID NO: 67253 - DNA, 80 bp, synthetic construct; identical to SEQ ID NO: 12153
  source 1..80: mol_type = other DNA

SEQ ID NO: 67254 - DNA, 80 bp, synthetic construct; identical to SEQ ID NO: 33069
  source 1..80: mol_type = other DNA

SEQ ID NO: 67255 - DNA, 80 bp, synthetic construct; identical to SEQ ID NO: 33070
  source 1..80: mol_type = other DNA

SEQ ID NO: 67256 - DNA, 80 bp, synthetic construct; identical to SEQ ID NO: 33071
  source 1..80: mol_type = other DNA

SEQ ID NO: 67257 - DNA, 80 bp, synthetic construct; identical to SEQ ID NO: 12154
  source 1..80: mol_type = other DNA

SEQ ID NO: 67258 - DNA, 80 bp, synthetic construct; identical to SEQ ID NO: 33073
  source 1..80: mol_type = other DNA

SEQ ID NO: 67259 - DNA, 80 bp, synthetic construct; identical to SEQ ID NO: 33074
  source 1..80: mol_type = other DNA

SEQ ID NO: 67260 - DNA, 80 bp, synthetic construct; identical to SEQ ID NO: 12155
  source 1..80: mol_type = other DNA

SEQ ID NO: 67261 - DNA, 80 bp, synthetic construct; identical to SEQ ID NO: 33076
  source 1..80: mol_type = other DNA

SEQ ID NO: 67262 - DNA, 80 bp, synthetic construct; identical to SEQ ID NO: 33077
  source 1..80: mol_type = other DNA

SEQ ID NO: 67263 - DNA, 80 bp, synthetic construct; identical to SEQ ID NO: 33078
  source 1..80: mol_type = other DNA

SEQ ID NO: 67264 - DNA, 80 bp, synthetic construct; identical to SEQ ID NO: 12156
  source 1..80: mol_type = other DNA

SEQ ID NO: 67265 - DNA, 80 bp, synthetic construct; identical to SEQ ID NO: 33080
  source 1..80: mol_type = other DNA

SEQ ID NO: 67266 - DNA, 80 bp, synthetic construct; identical to SEQ ID NO: 33081
  source 1..80: mol_type = other DNA

SEQ ID NO: 67267 - DNA, 80 bp, synthetic construct; identical to SEQ ID NO: 33082
  source 1..80: mol_type = other DNA

SEQ ID NO: 67268 - DNA, 80 bp, synthetic construct; identical to SEQ ID NO: 12157
  source 1..80: mol_type = other DNA

SEQ ID NO: 67269 - DNA, 80 bp, synthetic construct; identical to SEQ ID NO: 33084
  source 1..80: mol_type = other DNA

SEQ ID NO: 67270 - DNA, 80 bp, synthetic construct; identical to SEQ ID NO: 33085
  source 1..80: mol_type = other DNA

SEQ ID NO: 67271 - DNA, 80 bp, synthetic construct; identical to SEQ ID NO: 33086
  source 1..80: mol_type = other DNA

SEQ ID NO: 67272 - DNA, 80 bp, synthetic construct; identical to SEQ ID NO: 33087
  source 1..80: mol_type = other DNA

SEQ ID NO: 67273 - DNA, 80 bp, synthetic construct; identical to SEQ ID NO: 12158
  source 1..80: mol_type = other DNA

SEQ ID NO: 67274 - DNA, 80 bp, synthetic construct; identical to SEQ ID NO: 33089
  source 1..80: mol_type = other DNA

SEQ ID NO: 67275 - DNA, 80 bp, synthetic construct; identical to SEQ ID NO: 33090
  source 1..80: mol_type = other DNA

SEQ ID NO: 67276 - DNA, 80 bp, synthetic construct; identical to SEQ ID NO: 33091
  source 1..80: mol_type = other DNA

SEQ ID NO: 67277 - DNA, 80 bp, synthetic construct; identical to SEQ ID NO: 12159
  source 1..80: mol_type = other DNA

SEQ ID NO: 67278 - DNA, 80 bp, synthetic construct; identical to SEQ ID NO: 33093
  source 1..80: mol_type = other DNA

SEQ ID NO: 67279 - DNA, 80 bp, synthetic construct; identical to SEQ ID NO: 33094
  source 1..80: mol_type = other DNA

SEQ ID NO: 67280 - DNA, 80 bp, synthetic construct; identical to SEQ ID NO: 33095
  source 1..80: mol_type = other DNA

SEQ ID NO: 67281 - DNA, 80 bp, synthetic construct; identical to SEQ ID NO: 12160
  source 1..80: mol_type = other DNA

SEQ ID NO: 67282 - DNA, 80 bp, synthetic construct; identical to SEQ ID NO: 33097
  source 1..80: mol_type = other DNA

SEQ ID NO: 67283 - DNA, 80 bp, synthetic construct; identical to SEQ ID NO: 33098
  source 1..80: mol_type = other DNA

SEQ ID NO: 67284 - DNA, 80 bp, synthetic construct; identical to SEQ ID NO: 33099
  source 1..80: mol_type = other DNA

SEQ ID NO: 67285 - DNA, 80 bp, synthetic construct; identical to SEQ ID NO: 12161
  source 1..80: mol_type = other DNA

SEQ ID NO: 67286 - DNA, 80 bp, synthetic construct; identical to SEQ ID NO: 33101
  source 1..80: mol_type = other DNA

SEQ ID NO: 67287 - DNA, 80 bp, synthetic construct; identical to SEQ ID NO: 33102
  source 1..80: mol_type = other DNA

SEQ ID NO: 67288 - DNA, 80 bp, synthetic construct; identical to SEQ ID NO: 12162
  source 1..80: mol_type = other DNA

SEQ ID NO: 67289 - DNA, 80 bp, synthetic construct; identical to SEQ ID NO: 33105
  source 1..80: mol_type = other DNA

SEQ ID NO: 67290 - DNA, 80 bp, synthetic construct; identical to SEQ ID NO: 33106
  source 1..80: mol_type = other DNA

SEQ ID NO: 67291 - DNA, 80 bp, synthetic construct; identical to SEQ ID NO: 12163
  source 1..80: mol_type = other DNA

SEQ ID NO: 67292 - DNA, 80 bp, synthetic construct; identical to SEQ ID NO: 33108
  source 1..80: mol_type = other DNA

SEQ ID NO: 67293 - DNA, 80 bp, synthetic construct; identical to SEQ ID NO: 33109
  source 1..80: mol_type = other DNA

SEQ ID NO: 67294 - DNA, 80 bp, synthetic construct; identical to SEQ ID NO: 33110
  source 1..80: mol_type = other DNA

SEQ ID NO: 67295 - DNA, 80 bp, synthetic construct; identical to SEQ ID NO: 12164
  source 1..80: mol_type = other DNA

SEQ ID NO: 67296 - DNA, 80 bp, synthetic construct; identical to SEQ ID NO: 33112
  source 1..80: mol_type = other DNA

SEQ ID NO: 67297 - DNA, 80 bp, synthetic construct; identical to SEQ ID NO: 33113
  source 1..80: mol_type = other DNA

SEQ ID NO: 67298 - DNA, 80 bp, synthetic construct; identical to SEQ ID NO: 33114
  source 1..80: mol_type = other DNA

SEQ ID NO: 67299 - DNA, 80 bp, synthetic construct; identical to SEQ ID NO: 12165
  source 1..80: mol_type = other DNA

SEQ ID NO: 67300 - DNA, 80 bp, synthetic construct; identical to SEQ ID NO: 33116
  source 1..80: mol_type = other DNA

SEQ ID NO: 67301 - DNA, 80 bp, synthetic construct; identical to SEQ ID NO: 33117
  source 1..80: mol_type = other DNA

SEQ ID NO: 67302 - DNA, 80 bp, synthetic construct; identical to SEQ ID NO: 33118
  source 1..80: mol_type = other DNA

SEQ ID NO: 67303 - DNA, 80 bp, synthetic construct; identical to SEQ ID NO: 33119
  source 1..80: mol_type = other DNA

SEQ ID NO: 67304 - DNA, 80 bp, synthetic construct; identical to SEQ ID NO: 12166
  source 1..80: mol_type = other DNA

SEQ ID NO: 67305 - DNA, 80 bp, synthetic construct; identical to SEQ ID NO: 33121
  source 1..80: mol_type = other DNA

SEQ ID NO: 67306 - DNA, 80 bp, synthetic construct; identical to SEQ ID NO: 33122
  source 1..80: mol_type = other DNA

SEQ ID NO: 67307 - DNA, 80 bp, synthetic construct; identical to SEQ ID NO: 33123
  source 1..80: mol_type = other DNA

SEQ ID NO: 67308 - DNA, 80 bp, synthetic construct; identical to SEQ ID NO: 12167
  source 1..80: mol_type = other DNA

SEQ ID NO: 67309 - DNA, 80 bp, synthetic construct; identical to SEQ ID NO: 33125
  source 1..80: mol_type = other DNA

SEQ ID NO: 67310 - DNA, 80 bp, synthetic construct; identical to SEQ ID NO: 33126
  source 1..80: mol_type = other DNA

SEQ ID NO: 67311 - DNA, 80 bp, synthetic construct; identical to SEQ ID NO: 33127
  source 1..80: mol_type = other DNA

SEQ ID NO: 67312 - DNA, 80 bp, synthetic construct; identical to SEQ ID NO: 12168
  source 1..80: mol_type = other DNA

SEQ ID NO: 67313 - DNA, 80 bp, synthetic construct; identical to SEQ ID NO: 33129
  source 1..80: mol_type = other DNA

SEQ ID NO: 67314 - DNA, 80 bp, synthetic construct; identical to SEQ ID NO: 33130
  source 1..80: mol_type = other DNA

SEQ ID NO: 67315 - DNA, 80 bp, synthetic construct; identical to SEQ ID NO: 33131
  source 1..80: mol_type = other DNA

SEQ ID NO: 67316 - DNA, 80 bp, synthetic construct; identical to SEQ ID NO: 12169
  source 1..80: mol_type = other DNA

SEQ ID NO: 67317 - DNA, 80 bp, synthetic construct; identical to SEQ ID NO: 33133
  source 1..80: mol_type = other DNA

SEQ ID NO: 67318 - DNA, 80 bp, synthetic construct; identical to SEQ ID NO: 33134
  source 1..80: mol_type = other DNA

SEQ ID NO: 67319 - DNA, 80 bp, synthetic construct; identical to SEQ ID NO: 33135
  source 1..80: mol_type = other DNA

SEQ ID NO: 67320 - DNA, 80 bp, synthetic construct; identical to SEQ ID NO: 33136
  source 1..80: mol_type = other DNA

SEQ ID NO: 67321 - DNA, 80 bp, synthetic construct; identical to SEQ ID NO: 12170
  source 1..80: mol_type = other DNA

SEQ ID NO: 67322 - DNA, 80 bp, synthetic construct; identical to SEQ ID NO: 33138
  source 1..80: mol_type = other DNA

SEQ ID NO: 67323 - DNA, 80 bp, synthetic construct; identical to SEQ ID NO: 33139
  source 1..80: mol_type = other DNA

SEQ ID NO: 67324 - DNA, 80 bp, synthetic construct; identical to SEQ ID NO: 12171
  source 1..80: mol_type = other DNA

SEQ ID NO: 67325 - DNA, 80 bp, synthetic construct; identical to SEQ ID NO: 33141
  source 1..80: mol_type = other DNA

SEQ ID NO: 67326 - DNA, 80 bp, synthetic construct; identical to SEQ ID NO: 33142
  source 1..80: mol_type = other DNA

SEQ ID NO: 67327 - DNA, 80 bp, synthetic construct; identical to SEQ ID NO: 33143
  source 1..80: mol_type = other DNA

SEQ ID NO: 67328 - DNA, 80 bp, synthetic construct; identical to SEQ ID NO: 33144
  source 1..80: mol_type = other DNA

SEQ ID NO: 67329 - DNA, 80 bp, synthetic construct; identical to SEQ ID NO: 33145
  source 1..80: mol_type = other DNA

SEQ ID NO: 67330 - DNA, 80 bp, synthetic construct; identical to SEQ ID NO: 12172
  source 1..80: mol_type = other DNA

SEQ ID NO: 67331 - DNA, 80 bp, synthetic construct; identical to SEQ ID NO: 33147
  source 1..80: mol_type = other DNA

SEQ ID NO: 67332 - DNA, 80 bp, synthetic construct; identical to SEQ ID NO: 12173
  source 1..80: mol_type = other DNA

SEQ ID NO: 67333 - DNA, 80 bp, synthetic construct; identical to SEQ ID NO: 33149
  source 1..80: mol_type = other DNA

SEQ ID NO: 67334 - DNA, 80 bp, synthetic construct; identical to SEQ ID NO: 33150
  source 1..80: mol_type = other DNA

SEQ ID NO: 67335 - DNA, 80 bp, synthetic construct; identical to SEQ ID NO: 33151
  source 1..80: mol_type = other DNA

SEQ ID NO: 67336 - DNA, 80 bp, synthetic construct; identical to SEQ ID NO: 12174
  source 1..80: mol_type = other DNA

SEQ ID NO: 67337 - DNA, 80 bp, synthetic construct; identical to SEQ ID NO: 33153
  source 1..80: mol_type = other DNA

SEQ ID NO: 67338 - DNA, 80 bp, synthetic construct; identical to SEQ ID NO: 33154
  source 1..80: mol_type = other DNA

SEQ ID NO: 67339 - DNA, 80 bp, synthetic construct; identical to SEQ ID NO: 33155
  source 1..80: mol_type = other DNA

SEQ ID NO: 67340 - DNA, 80 bp, synthetic construct; identical to SEQ ID NO: 12175
  source 1..80: mol_type = other DNA

SEQ ID NO: 67341 - DNA, 80 bp, synthetic construct; identical to SEQ ID NO: 33157
  source 1..80: mol_type = other DNA

SEQ ID NO: 67342 - DNA, 80 bp, synthetic construct; identical to SEQ ID NO: 33158
  source 1..80: mol_type = other DNA

SEQ ID NO: 67343 - DNA, 80 bp, synthetic construct; identical to SEQ ID NO: 33159
  source 1..80: mol_type = other DNA

SEQ ID NO: 67344 - DNA, 80 bp, synthetic construct; identical to SEQ ID NO: 33160
  source 1..80: mol_type = other DNA

SEQ ID NO: 67345 - DNA, 80 bp, synthetic construct; identical to SEQ ID NO: 12176
  source 1..80: mol_type = other DNA

SEQ ID NO: 67346 - DNA, 80 bp, synthetic construct; identical to SEQ ID NO: 33162
  source 1..80: mol_type = other DNA

SEQ ID NO: 67347 - DNA, 80 bp, synthetic construct; identical to SEQ ID NO: 33163
  source 1..80: mol_type = other DNA

SEQ ID NO: 67348 - DNA, 80 bp, synthetic construct; identical to SEQ ID NO: 12177
  source 1..80: mol_type = other DNA

SEQ ID NO: 67349 - DNA, 80 bp, synthetic construct; identical to SEQ ID NO: 33165
  source 1..80: mol_type = other DNA

SEQ ID NO: 67350 - DNA, 80 bp, synthetic construct; identical to SEQ ID NO: 33166
  source 1..80: mol_type = other DNA

SEQ ID NO: 67351 - DNA, 80 bp, synthetic construct; identical to SEQ ID NO: 12178
  source 1..80: mol_type = other DNA

SEQ ID NO: 67352 - DNA, 80 bp, synthetic construct; identical to SEQ ID NO: 33169
  source 1..80: mol_type = other DNA

SEQ ID NO: 67353 - DNA, 80 bp, synthetic construct; identical to SEQ ID NO: 33170
  source 1..80: mol_type = other DNA

SEQ ID NO: 67354 - DNA, 80 bp, synthetic construct; identical to SEQ ID NO: 33171
  source 1..80: mol_type = other DNA

SEQ ID NO: 67355 - DNA, 80 bp, synthetic construct; identical to SEQ ID NO: 33172
  source 1..80: mol_type = other DNA

SEQ ID NO: 67356 - DNA, 80 bp, synthetic construct; identical to SEQ ID NO: 12179
  source 1..80: mol_type = other DNA

SEQ ID NO: 67357 - DNA, 80 bp, synthetic construct; identical to SEQ ID NO: 33174
  source 1..80: mol_type = other DNA

SEQ ID NO: 67358 - DNA, 80 bp, synthetic construct; identical to SEQ ID NO: 33175
  source 1..80: mol_type = other DNA

SEQ ID NO: 67359 - DNA, 80 bp, synthetic construct; identical to SEQ ID NO: 12180
  source 1..80: mol_type = other DNA

SEQ ID NO: 67360 - DNA, 80 bp, synthetic construct; identical to SEQ ID NO: 33177
  source 1..80: mol_type = other DNA

SEQ ID NO: 67361 - DNA, 80 bp, synthetic construct; identical to SEQ ID NO: 33178
  source 1..80: mol_type = other DNA

SEQ ID NO: 67362 - DNA, 80 bp, synthetic construct; identical to SEQ ID NO: 33179
  source 1..80: mol_type = other DNA

SEQ ID NO: 67363 - DNA, 80 bp, synthetic construct; identical to SEQ ID NO: 33180
  source 1..80: mol_type = other DNA

SEQ ID NO: 67364 - DNA, 80 bp, synthetic construct; identical to SEQ ID NO: 12181
  source 1..80: mol_type = other DNA

SEQ ID NO: 67365 - DNA, 80 bp, synthetic construct; identical to SEQ ID NO: 33182
  source 1..80: mol_type = other DNA

SEQ ID NO: 67366 - DNA, 80 bp, synthetic construct; identical to SEQ ID NO: 33183
  source 1..80: mol_type = other DNA

SEQ ID NO: 67367 - DNA, 80 bp, synthetic construct; identical to SEQ ID NO: 33184
  source 1..80: mol_type = other DNA

SEQ ID NO: 67368 - DNA, 80 bp, synthetic construct; identical to SEQ ID NO: 12182
  source 1..80: mol_type = other DNA

SEQ ID NO: 67369 - DNA, 80 bp, synthetic construct; identical to SEQ ID NO: 33186
  source 1..80: mol_type = other DNA

SEQ ID NO: 67370 - DNA, 80 bp, synthetic construct; identical to SEQ ID NO: 33187
  source 1..80: mol_type = other DNA

SEQ ID NO: 67371 - DNA, 80 bp, synthetic construct; identical to SEQ ID NO: 33188
  source 1..80: mol_type = other DNA

SEQ ID NO: 67372 - DNA, 80 bp, synthetic construct; identical to SEQ ID NO: 33189
  source 1..80: mol_type = other DNA

SEQ ID NO: 67373 - DNA, 80 bp, synthetic construct; identical to SEQ ID NO: 12183
  source 1..80: mol_type = other DNA

SEQ ID NO: 67374 - DNA, 80 bp, synthetic construct; identical to SEQ ID NO: 33191
  source 1..80: mol_type = other DNA

SEQ ID NO: 67375 - DNA, 80 bp, synthetic construct; identical to SEQ ID NO: 33192
  source 1..80: mol_type = other DNA

SEQ ID NO: 67376 - DNA, 80 bp, synthetic construct; identical to SEQ ID NO: 33193
  source 1..80: mol_type = other DNA

SEQ ID NO: 67377 - DNA, 80 bp, synthetic construct; identical to SEQ ID NO: 12184
  source 1..80: mol_type = other DNA

SEQ ID NO: 67378 - DNA, 80 bp, synthetic construct; identical to SEQ ID NO: 33195
  source 1..80: mol_type = other DNA

SEQ ID NO: 67379 - DNA, 80 bp, synthetic construct; identical to SEQ ID NO: 33196
  source 1..80: mol_type = other DNA

SEQ ID NO: 67380 - DNA, 80 bp, synthetic construct; identical to SEQ ID NO: 33197
  source 1..80: mol_type = other DNA

SEQ ID NO: 67381 - DNA, 80 bp, synthetic construct; identical to SEQ ID NO: 12185
  source 1..80: mol_type = other DNA

SEQ ID NO: 67382 - DNA, 80 bp, synthetic construct; identical to SEQ ID NO: 33199
  source 1..80: mol_type = other DNA

SEQ ID NO: 67383 - DNA, 80 bp, synthetic construct; identical to SEQ ID NO: 33200
  source 1..80: mol_type = other DNA

SEQ ID NO: 67384 - DNA, 80 bp, synthetic construct; identical to SEQ ID NO: 12186
  source 1..80: mol_type = other DNA

SEQ ID NO: 67385 - DNA, 80 bp, synthetic construct; identical to SEQ ID NO: 33202
  source 1..80: mol_type = other DNA

SEQ ID NO: 67386 - DNA, 80 bp, synthetic construct; identical to SEQ ID NO: 33203
  source 1..80: mol_type = other DNA

SEQ ID NO: 67387 - DNA, 80 bp, synthetic construct; identical to SEQ ID NO: 33204
  source 1..80: mol_type = other DNA

SEQ ID NO: 67388 - DNA, 80 bp, synthetic construct; identical to SEQ ID NO: 12187
  source 1..80: mol_type = other DNA

SEQ ID NO: 67389 - DNA, 80 bp, synthetic construct; identical to SEQ ID NO: 33206
  source 1..80: mol_type = other DNA

SEQ ID NO: 67390 - DNA, 80 bp, synthetic construct; identical to SEQ ID NO: 33207
  source 1..80: mol_type = other DNA

SEQ ID NO: 67391 - DNA, 80 bp, synthetic construct; identical to SEQ ID NO: 33208
  source 1..80: mol_type = other DNA

SEQ ID NO: 67392 - DNA, 80 bp, synthetic construct; identical to SEQ ID NO: 12188
  source 1..80: mol_type = other DNA

SEQ ID NO: 67393 - DNA, 80 bp, synthetic construct; identical to SEQ ID NO: 33210
  source 1..80: mol_type = other DNA

SEQ ID NO: 67394 - DNA, 80 bp, synthetic construct; identical to SEQ ID NO: 33211
  source 1..80: mol_type = other DNA

SEQ ID NO: 67395 - DNA, 80 bp, synthetic construct; identical to SEQ ID NO: 33212
  source 1..80: mol_type = other DNA

SEQ ID NO: 67396 - DNA, 80 bp, synthetic construct; identical to SEQ ID NO: 12189
  source 1..80: mol_type = other DNA

SEQ ID NO: 67397 - DNA, 80 bp, synthetic construct; identical to SEQ ID NO: 33214
  source 1..80: mol_type = other DNA

SEQ ID NO: 67398 - DNA, 80 bp, synthetic construct; identical to SEQ ID NO: 33215
  source 1..80: mol_type = other DNA

SEQ ID NO: 67399 - DNA, 80 bp, synthetic construct; identical to SEQ ID NO: 33216
  source 1..80: mol_type = other DNA

SEQ ID NO: 67400 - DNA, 80 bp, synthetic construct; identical to SEQ ID NO: 33217
  source 1..80: mol_type = other DNA

SEQ ID NO: 67401 - DNA, 80 bp, synthetic construct; identical to SEQ ID NO: 12190
  source 1..80: mol_type = other DNA

SEQ ID NO: 67402 - DNA, 80 bp, synthetic construct; identical to SEQ ID NO: 33219
  source 1..80: mol_type = other DNA

SEQ ID NO: 67403 - DNA, 80 bp, synthetic construct; identical to SEQ ID NO: 12191
  source 1..80: mol_type = other DNA

SEQ ID NO: 67404 - DNA, 80 bp, synthetic construct; identical to SEQ ID NO: 33222
  source 1..80: mol_type = other DNA

SEQ ID NO: 67405 - DNA, 80 bp, synthetic construct; identical to SEQ ID NO: 33223
  source 1..80: mol_type = other DNA

SEQ ID NO: 67406 - DNA, 80 bp, synthetic construct; identical to SEQ ID NO: 33224
  source 1..80: mol_type = other DNA

SEQ ID NO: 67407 - DNA, 80 bp, synthetic construct; identical to SEQ ID NO: 12192
  source 1..80: mol_type = other DNA

SEQ ID NO: 67408 - DNA, 80 bp, synthetic construct; identical to SEQ ID NO: 33226
  source 1..80: mol_type = other DNA

SEQ ID NO: 67409 - DNA, 80 bp, synthetic construct; identical to SEQ ID NO: 33227
  source 1..80: mol_type = other DNA

SEQ ID NO: 67410 - DNA, 80 bp, synthetic construct; identical to SEQ ID NO: 33228
  source 1..80: mol_type = other DNA

SEQ ID NO: 67411 - DNA, 80 bp, synthetic construct; identical to SEQ ID NO: 12193
  source 1..80: mol_type = other DNA

SEQ ID NO: 67412 - DNA, 80 bp, synthetic construct; identical to SEQ ID NO: 33230
  source 1..80: mol_type = other DNA

SEQ ID NO: 67413 - DNA, 80 bp, synthetic construct; identical to SEQ ID NO: 33231
  source 1..80: mol_type = other DNA

SEQ ID NO: 67414 - DNA, 80 bp, synthetic construct; identical to SEQ ID NO: 33232
  source 1..80: mol_type = other DNA

SEQ ID NO: 67415 - DNA, 80 bp, synthetic construct; identical to SEQ ID NO: 12194
  source 1..80: mol_type = other DNA

SEQ ID NO: 67416 - DNA, 80 bp, synthetic construct; identical to SEQ ID NO: 33234
  source 1..80: mol_type = other DNA

SEQ ID NO: 67417 - DNA, 80 bp, synthetic construct; identical to SEQ ID NO: 33235
  source 1..80: mol_type = other DNA

SEQ ID NO: 67418 - DNA, 80 bp, synthetic construct; identical to SEQ ID NO: 33236
  source 1..80: mol_type = other DNA

SEQ ID NO: 67419 - DNA, 80 bp, synthetic construct; identical to SEQ ID NO: 33237
  source 1..80: mol_type = other DNA

SEQ ID NO: 67420 - DNA, 80 bp, synthetic construct; identical to SEQ ID NO: 12195
  source 1..80: mol_type = other DNA

SEQ ID NO: 67421 - DNA, 80 bp, synthetic construct; identical to SEQ ID NO: 33239
  source 1..80: mol_type = other DNA

SEQ ID NO: 67422 - DNA, 80 bp, synthetic construct; identical to SEQ ID NO: 33240
  source 1..80: mol_type = other DNA

SEQ ID NO: 67423 - DNA, 80 bp, synthetic construct; identical to SEQ ID NO: 12196
  source 1..80: mol_type = other DNA

SEQ ID NO: 67424 - DNA, 80 bp, synthetic construct; identical to SEQ ID NO: 33242
  source 1..80: mol_type = other DNA

SEQ ID NO: 67425 - DNA, 80 bp, synthetic construct; identical to SEQ ID NO: 33243
  source 1..80: mol_type = other DNA

SEQ ID NO: 67426 - DNA, 80 bp, synthetic construct; identical to SEQ ID NO: 33244
  source 1..80: mol_type = other DNA

SEQ ID NO: 67427 - DNA, 80 bp, synthetic construct; identical to SEQ ID NO: 33245
  source 1..80: mol_type = other DNA

SEQ ID NO: 67428 - DNA, 80 bp, synthetic construct; identical to SEQ ID NO: 12197
  source 1..80: mol_type = other DNA

SEQ ID NO: 67429 - DNA, 80 bp, synthetic construct; identical to SEQ ID NO: 33247
  source 1..80: mol_type = other DNA

SEQ ID NO: 67430 - DNA, 80 bp, synthetic construct; identical to SEQ ID NO: 33248
  source 1..80: mol_type = other DNA

SEQ ID NO: 67431 - DNA, 80 bp, synthetic construct; identical to SEQ ID NO: 12198
  source 1..80: mol_type = other DNA

SEQ ID NO: 67432 - DNA, 80 bp, synthetic construct; identical to SEQ ID NO: 33251
  source 1..80: mol_type = other DNA

SEQ ID NO: 67433 - DNA, 80 bp, synthetic construct; identical to SEQ ID NO: 33252
  source 1..80: mol_type = other DNA

SEQ ID NO: 67434 - DNA, 80 bp, synthetic construct; identical to SEQ ID NO: 33253
  source 1..80: mol_type = other DNA

SEQ ID NO: 67435 - DNA, 80 bp, synthetic construct; identical to SEQ ID NO: 12199
  source 1..80: mol_type = other DNA

SEQ ID NO: 67436 - DNA, 80 bp, synthetic construct; identical to SEQ ID NO: 33255
  source 1..80: mol_type = other DNA

SEQ ID NO: 67437 - DNA, 80 bp, synthetic construct; identical to SEQ ID NO: 12200
  source 1..80: mol_type = other DNA

SEQ ID NO: 67438 - DNA, 80 bp, synthetic construct; identical to SEQ ID NO: 33258
  source 1..80: mol_type = other DNA

SEQ ID NO: 67439 - DNA, 80 bp, synthetic construct; identical to SEQ ID NO: 33259
  source 1..80: mol_type = other DNA

SEQ ID NO: 67440 - DNA, 80 bp, synthetic construct; identical to SEQ ID NO: 33260
  source 1..80: mol_type = other DNA

SEQ ID NO: 67441 - DNA, 80 bp, synthetic construct; identical to SEQ ID NO: 12201
  source 1..80: mol_type = other DNA

SEQ ID NO: 67442 - DNA, 80 bp, synthetic construct; identical to SEQ ID NO: 33262
  source 1..80: mol_type = other DNA

SEQ ID NO: 67443 - DNA, 80 bp, synthetic construct; identical to SEQ ID NO: 33263
  source 1..80: mol_type = other DNA

SEQ ID NO: 67444 - DNA, 80 bp, synthetic construct; identical to SEQ ID NO: 33264
  source 1..80: mol_type = other DNA

SEQ ID NO: 67445 - DNA, 80 bp, synthetic construct; identical to SEQ ID NO: 33265
  source 1..80: mol_type = other DNA

SEQ ID NO: 67446 - DNA, 80 bp, synthetic construct; identical to SEQ ID NO: 12202
  source 1..80: mol_type = other DNA

SEQ ID NO: 67447 - DNA, 80 bp, synthetic construct; identical to SEQ ID NO: 33267
  source 1..80: mol_type = other DNA

SEQ ID NO: 67448 - DNA, 80 bp, synthetic construct; identical to SEQ ID NO: 33268
  source 1..80: mol_type = other DNA

SEQ ID NO: 67449 - DNA, 80 bp, synthetic construct; identical to SEQ ID NO: 33269
  source 1..80: mol_type = other DNA

SEQ ID NO: 67450 - DNA, 80 bp, synthetic construct; identical to SEQ ID NO: 12203
  source 1..80: mol_type = other DNA

SEQ ID NO: 67451 - DNA, 80 bp, synthetic construct; identical to SEQ ID NO: 33271
  source 1..80: mol_type = other DNA

SEQ ID NO: 67452 - DNA, 80 bp, synthetic construct; identical to SEQ ID NO: 33272
  source 1..80: mol_type = other DNA

SEQ ID NO: 67453 - DNA, 80 bp, synthetic construct; identical to SEQ ID NO: 33273
  source 1..80: mol_type = other DNA

SEQ ID NO: 67454 - DNA, 80 bp, synthetic construct; identical to SEQ ID NO: 33274
  source 1..80: mol_type = other DNA

SEQ ID NO: 67455 - DNA, 80 bp, synthetic construct; identical to SEQ ID NO: 12204
  source 1..80: mol_type = other DNA

SEQ ID NO: 67456 - DNA, 80 bp, synthetic construct; identical to SEQ ID NO: 33276
  source 1..80: mol_type = other DNA

SEQ ID NO: 67457 - DNA, 80 bp, synthetic construct; identical to SEQ ID NO: 33277
  source 1..80: mol_type = other DNA

SEQ ID NO: 67458 - DNA, 80 bp, synthetic construct; identical to SEQ ID NO: 33278
  source 1..80: mol_type = other DNA

SEQ ID NO: 67459 - DNA, 80 bp, synthetic construct; identical to SEQ ID NO: 12205
  source 1..80: mol_type = other DNA

SEQ ID NO: 67460 - DNA, 80 bp, synthetic construct; identical to SEQ ID NO: 33280
  source 1..80: mol_type = other DNA

SEQ ID NO: 67461 - DNA, 80 bp, synthetic construct; identical to SEQ ID NO: 12206
  source 1..80: mol_type = other DNA

SEQ ID NO: 67462 - DNA, 80 bp, synthetic construct; identical to SEQ ID NO: 33282
  source 1..80: mol_type = other DNA

SEQ ID NO: 67463 - DNA, 80 bp, synthetic construct; identical to SEQ ID NO: 33283
  source 1..80: mol_type = other DNA

SEQ ID NO: 67464 - DNA, 80 bp, synthetic construct; identical to SEQ ID NO: 33284
  source 1..80: mol_type = other DNA

SEQ ID NO: 67465 - DNA, 80 bp, synthetic construct; identical to SEQ ID NO: 33285
  source 1..80: mol_type = other DNA

SEQ ID NO: 67466 - DNA, 80 bp, synthetic construct; identical to SEQ ID NO: 12207
  source 1..80: mol_type = other DNA

SEQ ID NO: 67467 - DNA, 80 bp, synthetic construct; identical to SEQ ID NO: 33287
  source 1..80: mol_type = other DNA

SEQ ID NO: 67468 - DNA, 80 bp, synthetic construct; identical to SEQ ID NO: 33288
  source 1..80: mol_type = other DNA

SEQ ID NO: 67469 - DNA, 80 bp, synthetic construct; identical to SEQ ID NO: 33289
  source 1..80: mol_type = other DNA

SEQ ID NO: 67470 - DNA, 80 bp, synthetic construct; identical to SEQ ID NO: 12208
  source 1..80: mol_type = other DNA

SEQ ID NO: 67471 - DNA, 80 bp, synthetic construct; identical to SEQ ID NO: 33291
  source 1..80: mol_type = other DNA

SEQ ID NO: 67472 - DNA, 80 bp, synthetic construct; identical to SEQ ID NO: 33292
  source 1..80: mol_type = other DNA

SEQ ID NO: 67473 - DNA, 80 bp, synthetic construct; identical to SEQ ID NO: 33293
  source 1..80: mol_type = other DNA

SEQ ID NO: 67474 - DNA, 80 bp, synthetic construct; identical to SEQ ID NO: 12209
  source 1..80: mol_type = other DNA

SEQ ID NO: 67475 - DNA, 80 bp, synthetic construct; identical to SEQ ID NO: 33295
  source 1..80: mol_type = other DNA

SEQ ID NO: 67476 - DNA, 80 bp, synthetic construct; identical to SEQ ID NO: 33296
  source 1..80: mol_type = other DNA

SEQ ID NO: 67477 - DNA, 80 bp, synthetic construct; identical to SEQ ID NO: 33297
  source 1..80: mol_type = other DNA

SEQ ID NO: 67478 - DNA, 80 bp, synthetic construct; identical to SEQ ID NO: 12210
  source 1..80: mol_type = other DNA

SEQ ID NO: 67479 - DNA, 80 bp, synthetic construct; identical to SEQ ID NO: 33299
  source 1..80: mol_type = other DNA

SEQ ID NO: 67480 - DNA, 80 bp, synthetic construct; identical to SEQ ID NO: 33300
  source 1..80: mol_type = other DNA

SEQ ID NO: 67481 - DNA, 80 bp, synthetic construct; identical to SEQ ID NO: 12211
  source 1..80: mol_type = other DNA

SEQ ID NO: 67482 - DNA, 80 bp, synthetic construct; identical to SEQ ID NO: 33302
  source 1..80: mol_type = other DNA

SEQ ID NO: 67483 - DNA, 80 bp, synthetic construct; identical to SEQ ID NO: 33303
  source 1..80: mol_type = other DNA

SEQ ID NO: 67484 - DNA, 80 bp, synthetic construct; identical to SEQ ID NO: 33304
  source 1..80: mol_type = other DNA

SEQ ID NO: 67485 - DNA, 80 bp, synthetic construct; identical to SEQ ID NO: 12212
  source 1..80: mol_type = other DNA

SEQ ID NO: 67486 - DNA, 80 bp, synthetic construct; identical to SEQ ID NO: 33307
  source 1..80: mol_type = other DNA

SEQ ID NO: 67487 - DNA, 80 bp, synthetic construct; identical to SEQ ID NO: 33308
  source 1..80: mol_type = other DNA

SEQ ID NO: 67488 - DNA, 80 bp, synthetic construct; identical to SEQ ID NO: 12213
  source 1..80: mol_type = other DNA

SEQ ID NO: 67489 - DNA, 80 bp, synthetic construct; identical to SEQ ID NO: 33310
  source 1..80: mol_type = other DNA

SEQ ID NO: 67490 - DNA, 80 bp, synthetic construct; identical to SEQ ID NO: 33311
  source 1..80: mol_type = other DNA

SEQ ID NO: 67491 - DNA, 80 bp, synthetic construct; identical to SEQ ID NO: 33312
  source 1..80: mol_type = other DNA

SEQ ID NO: 67492 - DNA, 80 bp, synthetic construct; identical to SEQ ID NO: 12214
  source 1..80: mol_type = other DNA

SEQ ID NO: 67493 - DNA, 80 bp, synthetic construct; identical to SEQ ID NO: 33315
  source 1..80: mol_type = other DNA

SEQ ID NO: 67494 - DNA, 80 bp, synthetic construct; identical to SEQ ID NO: 33316
  source 1..80: mol_type = other DNA

SEQ ID NO: 67495 - DNA, 80 bp, synthetic construct; identical to SEQ ID NO: 33317
  source 1..80: mol_type = other DNA

SEQ ID NO: 67496 - DNA, 80 bp, synthetic construct; identical to SEQ ID NO: 12215
  source 1..80: mol_type = other DNA

SEQ ID NO: 67497 - DNA, 80 bp, synthetic construct; identical to SEQ ID NO: 33319
  source 1..80: mol_type = other DNA

SEQ ID NO: 67498 - DNA, 80 bp, synthetic construct; identical to SEQ ID NO: 33320
  source 1..80: mol_type = other DNA

SEQ ID NO: 67499 - DNA, 80 bp, synthetic construct; identical to SEQ ID NO: 33321
  source 1..80: mol_type = other DNA

SEQ ID NO: 67500 - DNA, 80 bp, synthetic construct; identical to SEQ ID NO: 12216
  source 1..80: mol_type = other DNA

SEQ ID NO: 67501 - DNA, 80 bp, synthetic construct; identical to SEQ ID NO: 33323
  source 1..80: mol_type = other DNA

SEQ ID NO: 67502 - DNA, 80 bp, synthetic construct; identical to SEQ ID NO: 33324
  source 1..80: mol_type = other DNA

SEQ ID NO: 67503 - DNA, 80 bp, synthetic construct; identical to SEQ ID NO: 33325
  source 1..80: mol_type = other DNA

SEQ ID NO: 67504 - DNA, 80 bp, synthetic construct; identical to SEQ ID NO: 12217
  source 1..80: mol_type = other DNA

SEQ ID NO: 67505 - DNA, 80 bp, synthetic construct; identical to SEQ ID NO: 33327
  source 1..80: mol_type = other DNA

SEQ ID NO: 67506 - DNA, 80 bp, synthetic construct; identical to SEQ ID NO: 33328
  source 1..80: mol_type = other DNA

SEQ ID NO: 67507 - DNA, 80 bp, synthetic construct; identical to SEQ ID NO: 12218
  source 1..80: mol_type = other DNA

SEQ ID NO: 67508 - DNA, 80 bp, synthetic construct; identical to SEQ ID NO: 33330
  source 1..80: mol_type = other DNA

SEQ ID NO: 67509 - DNA, 80 bp, synthetic construct; identical to SEQ ID NO: 33331
  source 1..80: mol_type = other DNA

SEQ ID NO: 67510 - DNA, 80 bp, synthetic construct; identical to SEQ ID NO: 33332
  source 1..80: mol_type = other DNA

SEQ ID NO: 67511 - DNA, 80 bp, synthetic construct; identical to SEQ ID NO: 12219
  source 1..80: mol_type = other DNA

SEQ ID NO: 67512 - DNA, 80 bp, synthetic construct; identical to SEQ ID NO: 33334
  source 1..80: mol_type = other DNA

SEQ ID NO: 67513 - DNA, 80 bp, synthetic construct; identical to SEQ ID NO: 33335
  source 1..80: mol_type = other DNA

SEQ ID NO: 67514 - DNA, 80 bp, synthetic construct; identical to SEQ ID NO: 33336
  source 1..80: mol_type = other DNA

SEQ ID NO: 67515 - DNA, 80 bp, synthetic construct; identical to SEQ ID NO: 12220
  source 1..80: mol_type = other DNA

SEQ ID NO: 67516 - DNA, 80 bp, synthetic construct; identical to SEQ ID NO: 33339
  source 1..80: mol_type = other DNA

SEQ ID NO: 67517 - DNA, 80 bp, synthetic construct; identical to SEQ ID NO: 33340
  source 1..80: mol_type = other DNA

SEQ ID NO: 67518 - DNA, 80 bp, synthetic construct; identical to SEQ ID NO: 12221
  source 1..80: mol_type = other DNA

SEQ ID NO: 67519 - DNA, 80 bp, synthetic construct; identical to SEQ ID NO: 33342
  source 1..80: mol_type = other DNA

SEQ ID NO: 67520 - DNA, 80 bp, synthetic construct; identical to SEQ ID NO: 33343
  source 1..80: mol_type = other DNA

SEQ ID NO: 67521 - DNA, 80 bp, synthetic construct; identical to SEQ ID NO: 33344
  source 1..80: mol_type = other DNA

SEQ ID NO: 67522 - DNA, 80 bp, synthetic construct; identical to SEQ ID NO: 33345
  source 1..80: mol_type = other DNA

SEQ ID NO: 67523 - DNA, 80 bp, synthetic construct; identical to SEQ ID NO: 12222
  source 1..80: mol_type = other DNA

SEQ ID NO: 67524 - DNA, 80 bp, synthetic construct; identical to SEQ ID NO: 33347
  source 1..80: mol_type = other DNA

SEQ ID NO: 67525 - DNA, 80 bp, synthetic construct; identical to SEQ ID NO: 33348
  source 1..80: mol_type = other DNA

SEQ ID NO: 67526 - DNA, 80 bp, synthetic construct; identical to SEQ ID NO: 33349
  source 1..80: mol_type = other DNA

SEQ ID NO: 67527 - DNA, 80 bp, synthetic construct; identical to SEQ ID NO: 12223
  source 1..80: mol_type = other DNA

SEQ ID NO: 67528 - DNA, 80 bp, synthetic construct; identical to SEQ ID NO: 33351
  source 1..80: mol_type = other DNA

SEQ ID NO: 67529 - DNA, 80 bp, synthetic construct; identical to SEQ ID NO: 33352
  source 1..80: mol_type = other DNA

SEQ ID NO: 67530 - DNA, 80 bp, synthetic construct; identical to SEQ ID NO: 33353
  source 1..80: mol_type = other DNA

SEQ ID NO: 67531 - DNA, 80 bp, synthetic construct; identical to SEQ ID NO: 33354
  source 1..80: mol_type = other DNA

SEQ ID NO: 67532 - DNA, 80 bp, synthetic construct; identical to SEQ ID NO: 12224
  source 1..80: mol_type = other DNA

SEQ ID NO: 67533 - DNA, 80 bp, synthetic construct; identical to SEQ ID NO: 33356
  source 1..80: mol_type = other DNA

SEQ ID NO: 67534 - DNA, 80 bp, synthetic construct; identical to SEQ ID NO: 33357
  source 1..80: mol_type = other DNA

SEQ ID NO: 67535 - DNA, 80 bp, synthetic construct; identical to SEQ ID NO: 12225
  source 1..80: mol_type = other DNA

SEQ ID NO: 67536 - DNA, 80 bp, synthetic construct; identical to SEQ ID NO: 33359
  source 1..80: mol_type = other DNA

SEQ ID NO: 67537 - DNA, 80 bp, synthetic construct; identical to SEQ ID NO: 33360
  source 1..80: mol_type = other DNA

SEQ ID NO: 67538 - DNA, 80 bp, synthetic construct; identical to SEQ ID NO: 33361
  source 1..80: mol_type = other DNA

SEQ ID NO: 67539 - DNA, 80 bp, synthetic construct; identical to SEQ ID NO: 12226
  source 1..80: mol_type = other DNA

SEQ ID NO: 67540 - DNA, 80 bp, synthetic construct; identical to SEQ ID NO: 33363
  source 1..80: mol_type = other DNA

SEQ ID NO: 67541 - DNA, 80 bp, synthetic construct; identical to SEQ ID NO: 33364
  source 1..80: mol_type = other DNA

SEQ ID NO: 67542 - DNA, 80 bp, synthetic construct; identical to SEQ ID NO: 33365
  source 1..80: mol_type = other DNA

SEQ ID NO: 67543 - DNA, 80 bp, synthetic construct; identical to SEQ ID NO: 12227
  source 1..80: mol_type = other DNA

SEQ ID NO: 67544 - DNA, 80 bp, synthetic construct; identical to SEQ ID NO: 33367
  source 1..80: mol_type = other DNA

SEQ ID NO: 67545 - DNA, 80 bp, synthetic construct; identical to SEQ ID NO: 33368
  source 1..80: mol_type = other DNA

SEQ ID NO: 67546 - DNA, 80 bp, synthetic construct; identical to SEQ ID NO: 33369
  source 1..80: mol_type = other DNA

SEQ ID NO: 67547 - DNA, 80 bp, synthetic construct; identical to SEQ ID NO: 12228
  source 1..80: mol_type = other DNA

SEQ ID NO: 67548 - DNA, 80 bp, synthetic construct; identical to SEQ ID NO: 33371
  source 1..80: mol_type = other DNA

SEQ ID NO: 67549 - DNA, 80 bp, synthetic construct; identical to SEQ ID NO: 33372
  source 1..80: mol_type = other DNA

SEQ ID NO: 67550 - DNA, 80 bp, synthetic construct; identical to SEQ ID NO: 33373
  source 1..80: mol_type = other DNA

SEQ ID NO: 67551 - DNA, 80 bp, synthetic construct; identical to SEQ ID NO: 12229
  source 1..80: mol_type = other DNA

SEQ ID NO: 67552 - DNA, 80 bp, synthetic construct; identical to SEQ ID NO: 33375
  source 1..80: mol_type = other DNA

SEQ ID NO: 67553 - DNA, 80 bp, synthetic construct; identical to SEQ ID NO: 33376
  source 1..80: mol_type = other DNA

SEQ ID NO: 67554 - DNA, 80 bp, synthetic construct; identical to SEQ ID NO: 33377
  source 1..80: mol_type = other DNA

SEQ ID NO: 67555 - DNA, 80 bp, synthetic construct; identical to SEQ ID NO: 12230
  source 1..80: mol_type = other DNA

SEQ ID NO: 67556 - DNA, 80 bp, synthetic construct; identical to SEQ ID NO: 33379
  source 1..80: mol_type = other DNA

SEQ ID NO: 67557 - DNA, 80 bp, synthetic construct; identical to SEQ ID NO: 33380
  source 1..80: mol_type = other DNA

SEQ ID NO: 67558 - DNA, 80 bp, synthetic construct; identical to SEQ ID NO: 33381
  source 1..80: mol_type = other DNA

SEQ ID NO: 67559 - DNA, 80 bp, synthetic construct; identical to SEQ ID NO: 33382
  source 1..80: mol_type = other DNA

SEQ ID NO: 67560 - DNA, 80 bp, synthetic construct; identical to SEQ ID NO: 33383
  source 1..80: mol_type = other DNA

SEQ ID NO: 67561 - DNA, 80 bp, synthetic construct; identical to SEQ ID NO: 12231
  source 1..80: mol_type = other DNA

SEQ ID NO: 67562 - DNA, 80 bp, synthetic construct; identical to SEQ ID NO: 33385
  source 1..80: mol_type = other DNA

SEQ ID NO: 67563 - DNA, 80 bp, synthetic construct; identical to SEQ ID NO: 12232
  source 1..80: mol_type = other DNA

SEQ ID NO: 67564 - DNA, 80 bp, synthetic construct; identical to SEQ ID NO: 33389
  source 1..80: mol_type = other DNA

SEQ ID NO: 67565 - DNA, 80 bp, synthetic construct; identical to SEQ ID NO: 33390
  source 1..80: mol_type = other DNA

SEQ ID NO: 67566 - DNA, 80 bp, synthetic construct; identical to SEQ ID NO: 12233
  source 1..80: mol_type = other DNA

SEQ ID NO: 67567 - DNA, 80 bp, synthetic construct; identical to SEQ ID NO: 33392
  source 1..80: mol_type = other DNA

SEQ ID NO: 67568 - DNA, 80 bp, synthetic construct; identical to SEQ ID NO: 33393
  source 1..80: mol_type = other DNA

SEQ ID NO: 67569 - DNA, 80 bp, synthetic construct; identical to SEQ ID NO: 33394
  source 1..80: mol_type = other DNA

SEQ ID NO: 67570 - DNA, 80 bp, synthetic construct; identical to SEQ ID NO: 12234
  source 1..80: mol_type = other DNA

SEQ ID NO: 67571 - DNA, 80 bp, synthetic construct; identical to SEQ ID NO: 33396
  source 1..80: mol_type = other DNA

SEQ ID NO: 67572 - DNA, 80 bp, synthetic construct; identical to SEQ ID NO: 33397
  source 1..80: mol_type = other DNA

SEQ ID NO: 67573 - DNA, 80 bp, synthetic construct; identical to SEQ ID NO: 33398
  source 1..80: mol_type = other DNA

SEQ ID NO: 67574 - DNA, 80 bp, synthetic construct; identical to SEQ ID NO: 33399
  source 1..80: mol_type = other DNA

SEQ ID NO: 67575 - DNA, 80 bp, synthetic construct; identical to SEQ ID NO: 12235
  source 1..80: mol_type = other DNA

SEQ ID NO: 67576 - DNA, 80 bp, synthetic construct; identical to SEQ ID NO: 33401
  source 1..80: mol_type = other DNA

SEQ ID NO: 67577 - DNA, 80 bp, synthetic construct; identical to SEQ ID NO: 33402
  source 1..80: mol_type = other DNA

SEQ ID NO: 67578 - DNA, 80 bp, synthetic construct; identical to SEQ ID NO: 33403
  source 1..80: mol_type = other DNA

SEQ ID NO: 67579 - DNA, 80 bp, synthetic construct; identical to SEQ ID NO: 12236
  source 1..80: mol_type = other DNA

SEQ ID NO: 67580 - DNA, 80 bp, synthetic construct; identical to SEQ ID NO: 33405
  source 1..80: mol_type = other DNA

SEQ ID NO: 67581 - DNA, 80 bp, synthetic construct; identical to SEQ ID NO: 33406
  source 1..80: mol_type = other DNA

SEQ ID NO: 67582 - DNA, 80 bp, synthetic construct; identical to SEQ ID NO: 33407
  source 1..80: mol_type = other DNA

SEQ ID NO: 67583 - DNA, 80 bp, synthetic construct; identical to SEQ ID NO: 12237
  source 1..80: mol_type = other DNA

SEQ ID NO: 67584 - DNA, 80 bp, synthetic construct; identical to SEQ ID NO: 33409
  source 1..80: mol_type = other DNA

SEQ ID NO: 67585 - DNA, 80 bp, synthetic construct; identical to SEQ ID NO: 33410
  source 1..80: mol_type = other DNA

SEQ ID NO: 67586 - DNA, 80 bp, synthetic construct; identical to SEQ ID NO: 12238
  source 1..80: mol_type = other DNA

SEQ ID NO: 67587 - DNA, 80 bp, synthetic construct; identical to SEQ ID NO: 33412
  source 1..80: mol_type = other DNA

SEQ ID NO: 67588 - DNA, 80 bp, synthetic construct; identical to SEQ ID NO: 33413
  source 1..80: mol_type = other DNA

SEQ ID NO: 67589 - DNA, 80 bp, synthetic construct; identical to SEQ ID NO: 33414
  source 1..80: mol_type = other DNA

SEQ ID NO: 67590 - DNA, 80 bp, synthetic construct; identical to SEQ ID NO: 33415
  source 1..80: mol_type = other DNA

SEQ ID NO: 67591 - DNA, 80 bp, synthetic construct; identical to SEQ ID NO: 12239
  source 1..80: mol_type = other DNA

SEQ ID NO: 67592 - DNA, 80 bp, synthetic construct; identical to SEQ ID NO: 33417
  source 1..80: mol_type = other DNA

SEQ ID NO: 67593 - DNA, 80 bp, synthetic construct; identical to SEQ ID NO: 33418
  source 1..80: mol_type = other DNA

SEQ ID NO: 67594 - DNA, 80 bp, synthetic construct; identical to SEQ ID NO: 12240
  source 1..80: mol_type = other DNA

SEQ ID NO: 67595 - DNA, 80 bp, synthetic construct; identical to SEQ ID NO: 33420
  source 1..80: mol_type = other DNA

SEQ ID NO: 67596 - DNA, 80 bp, synthetic construct; identical to SEQ ID NO: 33421
  source 1..80: mol_type = other DNA

SEQ ID NO: 67597 - DNA, 80 bp, synthetic construct; identical to SEQ ID NO: 33422
  source 1..80: mol_type = other DNA

SEQ ID NO: 67598 - DNA, 80 bp, synthetic construct; identical to SEQ ID NO: 33423
  source 1..80: mol_type = other DNA

SEQ ID NO: 67599 - DNA, 80 bp, synthetic construct; identical to SEQ ID NO: 12241
  source 1..80: mol_type = other DNA

SEQ ID NO: 67600 - DNA, 80 bp, synthetic construct; identical to SEQ ID NO: 33425
  source 1..80: mol_type = other DNA

SEQ ID NO: 67601 - DNA, 80 bp, synthetic construct; identical to SEQ ID NO: 33426
  source 1..80: mol_type = other DNA

SEQ ID NO: 67602 - DNA, 80 bp, synthetic construct; identical to SEQ ID NO: 33427
  source 1..80: mol_type = other DNA

SEQ ID NO: 67603 - DNA, 80 bp, synthetic construct; identical to SEQ ID NO: 12242
  source 1..80: mol_type = other DNA

SEQ ID NO: 67604 - DNA, 80 bp, synthetic construct; identical to SEQ ID NO: 33429
  source 1..80: mol_type = other DNA

SEQ ID NO: 67605 - DNA, 80 bp, synthetic construct; identical to SEQ ID NO: 33430
  source 1..80: mol_type = other DNA

SEQ ID NO: 67606 - DNA, 80 bp, synthetic construct; identical to SEQ ID NO: 33431
  source 1..80: mol_type = other DNA

SEQ ID NO: 67607 - DNA, 80 bp, synthetic construct; identical to SEQ ID NO: 12243
  source 1..80: mol_type = other DNA

SEQ ID NO: 67608 - DNA, 80 bp, synthetic construct; identical to SEQ ID NO: 33433
  source 1..80: mol_type = other DNA

SEQ ID NO: 67609 - DNA, 80 bp, synthetic construct; identical to SEQ ID NO: 33434
  source 1..80: mol_type = other DNA

SEQ ID NO: 67610 - DNA, 80 bp, synthetic construct; identical to SEQ ID NO: 33435
  source 1..80: mol_type = other DNA

SEQ ID NO: 67611 - DNA, 80 bp, synthetic construct; identical to SEQ ID NO: 12244
  source 1..80: mol_type = other DNA

SEQ ID NO: 67612 - DNA, 80 bp, synthetic construct; identical to SEQ ID NO: 33437
  source 1..80: mol_type = other DNA

SEQ ID NO: 67613 - DNA, 80 bp, synthetic construct; identical to SEQ ID NO: 33438
  source 1..80: mol_type = other DNA

SEQ ID NO: 67614 - DNA, 80 bp, synthetic construct; identical to SEQ ID NO: 12245
  source 1..80: mol_type = other DNA

SEQ ID NO: 67615 - DNA, 80 bp, synthetic construct; identical to SEQ ID NO: 33440
  source 1..80: mol_type = other DNA

SEQ ID NO: 67616 - DNA, 80 bp, synthetic construct; identical to SEQ ID NO: 33441
  source 1..80: mol_type = other DNA

SEQ ID NO: 67617 - DNA, 80 bp, synthetic construct; identical to SEQ ID NO: 33442
  source 1..80: mol_type = other DNA

SEQ ID NO: 67618 - DNA, 80 bp, synthetic construct; identical to SEQ ID NO: 12246
  source 1..80: mol_type = other DNA

SEQ ID NO: 67619 - DNA, 80 bp, synthetic construct; identical to SEQ ID NO: 33445
  source 1..80: mol_type = other DNA

SEQ ID NO: 67620 - DNA, 80 bp, synthetic construct; identical to SEQ ID NO: 33446
  source 1..80: mol_type = other DNA

SEQ ID NO: 67621 - DNA, 80 bp, synthetic construct; identical to SEQ ID NO: 33447
  source 1..80: mol_type = other DNA

SEQ ID NO: 67622 - DNA, 80 bp, synthetic construct; identical to SEQ ID NO: 12247
  source 1..80: mol_type = other DNA

SEQ ID NO: 67623 - DNA, 80 bp, synthetic construct; identical to SEQ ID NO: 33449
  source 1..80: mol_type = other DNA

SEQ ID NO: 67624 - DNA, 80 bp, synthetic construct; identical to SEQ ID NO: 33450
  source 1..80: mol_type = other DNA

SEQ ID NO: 67625 - DNA, 80 bp, synthetic construct; identical to SEQ ID NO: 33451
  source 1..80: mol_type = other DNA

SEQ ID NO: 67626 - DNA, 80 bp, synthetic construct; identical to SEQ ID NO: 12248
  source 1..80: mol_type = other DNA

SEQ ID NO: 67627 - DNA, 80 bp, synthetic construct; identical to SEQ ID NO: 33453
  source 1..80: mol_type = other DNA

SEQ ID NO: 67628 - DNA, 80 bp, synthetic construct; identical to SEQ ID NO: 33454
  source 1..80: mol_type = other DNA

SEQ ID NO: 67629 - DNA, 80 bp, synthetic construct; identical to SEQ ID NO: 12249
  source 1..80: mol_type = other DNA

SEQ ID NO: 67630 - DNA, 80 bp, synthetic construct; identical to SEQ ID NO: 33456
  source 1..80: mol_type = other DNA

SEQ ID NO: 67631 - DNA, 80 bp, synthetic construct; identical to SEQ ID NO: 33457
  source 1..80: mol_type = other DNA

SEQ ID NO: 67632 - DNA, 80 bp, synthetic construct; identical to SEQ ID NO: 33458
  source 1..80: mol_type = other DNA

SEQ ID NO: 67633 - DNA, 80 bp, synthetic construct; identical to SEQ ID NO: 12250
  source 1..80: mol_type = other DNA

SEQ ID NO: 67634 - DNA, 80 bp, synthetic construct; identical to SEQ ID NO: 33460
  source 1..80: mol_type = other DNA

SEQ ID NO: 67635 - DNA, 80 bp, synthetic construct; identical to SEQ ID NO: 33461
  source 1..80: mol_type = other DNA

SEQ ID NO: 67636 - DNA, 80 bp, synthetic construct; identical to SEQ ID NO: 33462
  source 1..80: mol_type = other DNA

SEQ ID NO: 67637 - DNA, 80 bp, synthetic construct; identical to SEQ ID NO: 33463
  source 1..80: mol_type = other DNA

SEQ ID NO: 67638 - DNA, 80 bp, synthetic construct; identical to SEQ ID NO: 12251
  source 1..80: mol_type = other DNA

SEQ ID NO: 67639 - DNA, 80 bp, synthetic construct; identical to SEQ ID NO: 33465
  source 1..80: mol_type = other DNA

SEQ ID NO: 67640 - DNA, 80 bp, synthetic construct; identical to SEQ ID NO: 33466
  source 1..80: mol_type = other DNA

SEQ ID NO: 67641 - DNA, 80 bp, synthetic construct; identical to SEQ ID NO: 33467
  source 1..80: mol_type = other DNA

SEQ ID NO: 67642 - DNA, 80 bp, synthetic construct; identical to SEQ ID NO: 12252
  source 1..80: mol_type = other DNA

SEQ ID NO: 67643 - DNA, 80 bp, synthetic construct; identical to SEQ ID NO: 33469
  source 1..80: mol_type = other DNA

SEQ ID NO: 67644 - DNA, 80 bp, synthetic construct; identical to SEQ ID NO: 33470
  source 1..80: mol_type = other DNA

SEQ ID NO: 67645 - DNA, 80 bp, synthetic construct; identical to SEQ ID NO: 12256
  source 1..80: mol_type = other DNA

SEQ ID NO: 67646 - DNA, 80 bp, synthetic construct; identical to SEQ ID NO: 33472
  source 1..80: mol_type = other DNA

SEQ ID NO: 67647 - DNA, 80 bp, synthetic construct; identical to SEQ ID NO: 33473
  source 1..80: mol_type = other DNA

SEQ ID NO: 67648 - DNA, 80 bp, synthetic construct; identical to SEQ ID NO: 33474
  source 1..80: mol_type = other DNA

SEQ ID NO: 67649 - DNA, 80 bp, synthetic construct; identical to SEQ ID NO: 12257
  source 1..80: mol_type = other DNA

SEQ ID NO: 67650 - DNA, 80 bp, synthetic construct; identical to SEQ ID NO: 33476
  source 1..80: mol_type = other DNA

SEQ ID NO: 67651 - DNA, 80 bp, synthetic construct; identical to SEQ ID NO: 33477
  source 1..80: mol_type = other DNA

SEQ ID NO: 67652 - DNA, 80 bp, synthetic construct; identical to SEQ ID NO: 33479
  source 1..80: mol_type = other DNA

SEQ ID NO: 67653 - DNA, 80 bp, synthetic construct; identical to SEQ ID NO: 12258
  source 1..80: mol_type = other DNA

SEQ ID NO: 67654 - DNA, 80 bp, synthetic construct; identical to SEQ ID NO: 33481
  source 1..80: mol_type = other DNA

SEQ ID NO: 67655 - DNA, 80 bp, synthetic construct; identical to SEQ ID NO: 33482
  source 1..80: mol_type = other DNA

SEQ ID NO: 67656 - DNA, 80 bp, synthetic construct; identical to SEQ ID NO: 33483
  source 1..80: mol_type = other DNA

SEQ ID NO: 67657 - DNA, 80 bp, synthetic construct; identical to SEQ ID NO: 12259
  source 1..80: mol_type = other DNA

SEQ ID NO: 67658 - DNA, 80 bp, synthetic construct; identical to SEQ ID NO: 33485
  source 1..80: mol_type = other DNA

SEQ ID NO: 67659 - DNA, 80 bp, synthetic construct; identical to SEQ ID NO: 33486
  source 1..80: mol_type = other DNA

SEQ ID NO: 67660 - DNA, 80 bp, synthetic construct; identical to SEQ ID NO: 33487
  source 1..80: mol_type = other DNA

SEQ ID NO: 67661 - DNA, 80 bp, synthetic construct; identical to SEQ ID NO: 12260
  source 1..80: mol_type = other DNA

SEQ ID NO: 67662 - DNA, 80 bp, synthetic construct; identical to SEQ ID NO: 33489
  source 1..80: mol_type = other DNA

SEQ ID NO: 67663 - DNA, 80 bp, synthetic construct; identical to SEQ ID NO: 33490
  source 1..80: mol_type = other DNA

SEQ ID NO: 67664 - DNA, 80 bp, synthetic construct; identical to SEQ ID NO: 33491
  source 1..80: mol_type = other DNA

SEQ ID NO: 67665 - DNA, 80 bp, synthetic construct; identical to SEQ ID NO: 12261
  source 1..80: mol_type = other DNA

SEQ ID NO: 67666 - DNA, 80 bp, synthetic construct; identical to SEQ ID NO: 33493
  source 1..80: mol_type = other DNA

SEQ ID NO: 67667 - DNA, 80 bp, synthetic construct; identical to SEQ ID NO: 33494
  source 1..80: mol_type = other DNA

SEQ ID NO: 67668 - DNA, 80 bp, synthetic construct; identical to SEQ ID NO: 33495
  source 1..80: mol_type = other DNA

SEQ ID NO: 67669 - DNA, 80 bp, synthetic construct; identical to SEQ ID NO: 33496
  source 1..80: mol_type = other DNA

SEQ ID NO: 67670 - DNA, 80 bp, synthetic construct; identical to SEQ ID NO: 12262
  source 1..80: mol_type = other DNA

SEQ ID NO: 67671 - DNA, 80 bp, synthetic construct; identical to SEQ ID NO: 33498
  source 1..80: mol_type = other DNA

SEQ ID NO: 67672 - DNA, 80 bp, synthetic construct; identical to SEQ ID NO: 33499
  source 1..80: mol_type = other DNA

SEQ ID NO: 67673 - DNA, 80 bp, synthetic construct; identical to SEQ ID NO: 33500
  source 1..80: mol_type = other DNA

SEQ ID NO: 67674 - DNA, 80 bp, synthetic construct; identical to SEQ ID NO: 12263
  source 1..80: mol_type = other DNA

SEQ ID NO: 67675 - DNA, 80 bp, synthetic construct; identical to SEQ ID NO: 33502
  source 1..80: mol_type = other DNA

SEQ ID NO: 67676 - DNA, 80 bp, synthetic construct; identical to SEQ ID NO: 33503
  source 1..80: mol_type = other DNA

SEQ ID NO: 67677 - DNA, 80 bp, synthetic construct; identical to SEQ ID NO: 12264
  source 1..80: mol_type = other DNA

SEQ ID NO: 67678 - DNA, 80 bp, synthetic construct; identical to SEQ ID NO: 33505
  source 1..80: mol_type = other DNA

SEQ ID NO: 67679 - DNA, 80 bp, synthetic construct; identical to SEQ ID NO: 33506
  source 1..80: mol_type = other DNA

SEQ ID NO: 67680 - DNA, 80 bp, synthetic construct; identical to SEQ ID NO: 33507
  source 1..80: mol_type = other DNA

SEQ ID NO: 67681 - DNA, 80 bp, synthetic construct; identical to SEQ ID NO: 33508
  source 1..80: mol_type = other DNA

SEQ ID NO: 67682 - DNA, 80 bp, synthetic construct; identical to SEQ ID NO: 12265
  source 1..80: mol_type = other DNA

SEQ ID NO: 67683 - DNA, 80 bp, synthetic construct; identical to SEQ ID NO: 33510
  source 1..80: mol_type = other DNA

SEQ ID NO: 67684 - DNA, 80 bp, synthetic construct; identical to SEQ ID NO: 33511
  source 1..80: mol_type = other DNA

SEQ ID NO: 67685 - DNA, 80 bp, synthetic construct; identical to SEQ ID NO: 33512
  source 1..80: mol_type = other DNA

SEQ ID NO: 67686 - DNA, 80 bp, synthetic construct; identical to SEQ ID NO: 12266
  source 1..80: mol_type = other DNA

SEQ ID NO: 67687 - DNA, 80 bp, synthetic construct; identical to SEQ ID NO: 33514
  source 1..80: mol_type = other DNA

SEQ ID NO: 67688 - DNA, 80 bp, synthetic construct; identical to SEQ ID NO: 33515
  source 1..80: mol_type = other DNA

SEQ ID NO: 67689 - DNA, 80 bp, synthetic construct; identical to SEQ ID NO: 33516
  source 1..80: mol_type = other DNA

SEQ ID NO: 67690 - DNA, 80 bp, synthetic construct; identical to SEQ ID NO: 12267
  source 1..80: mol_type = other DNA

SEQ ID NO: 67691 - DNA, 80 bp, synthetic construct; identical to SEQ ID NO: 33518
  source 1..80: mol_type = other DNA

SEQ ID NO: 67692 - DNA, 80 bp, synthetic construct; identical to SEQ ID NO: 33519
  source 1..80: mol_type = other DNA

SEQ ID NO: 67693 - DNA, 80 bp, synthetic construct; identical to SEQ ID NO: 33520
  source 1..80: mol_type = other DNA

SEQ ID NO: 67694 - DNA, 80 bp, synthetic construct; identical to SEQ ID NO: 33521
  source 1..80: mol_type = other DNA

SEQ ID NO: 67695 - DNA, 80 bp, synthetic construct; identical to SEQ ID NO: 12268
  source 1..80: mol_type = other DNA

SEQ ID NO: 67696 - DNA, 80 bp, synthetic construct; identical to SEQ ID NO: 33523
  source 1..80: mol_type = other DNA

SEQ ID NO: 67697 - DNA, 80 bp, synthetic construct; identical to SEQ ID NO: 33524
  source 1..80: mol_type = other DNA

SEQ ID NO: 67698 - DNA, 80 bp, synthetic construct; identical to SEQ ID NO: 33525
  source 1..80: mol_type = other DNA

SEQ ID NO: 67699 - DNA, 80 bp, synthetic construct; identical to SEQ ID NO: 12269
  source 1..80: mol_type = other DNA

SEQ ID NO: 67700 - DNA, 80 bp, synthetic construct; identical to SEQ ID NO: 33527
  source 1..80: mol_type = other DNA

SEQ ID NO: 67701 - DNA, 80 bp, synthetic construct; identical to SEQ ID NO: 33528
  source 1..80: mol_type = other DNA

SEQ ID NO: 67702 - DNA, 80 bp, synthetic construct; identical to SEQ ID NO: 33529
  source 1..80: mol_type = other DNA

SEQ ID NO: 67703 - DNA, 80 bp, synthetic construct; identical to SEQ ID NO: 12270
  source 1..80: mol_type = other DNA

SEQ ID NO: 67704 - DNA, 80 bp, synthetic construct; identical to SEQ ID NO: 33531
  source 1..80: mol_type = other DNA

SEQ ID NO: 67705 - DNA, 80 bp, synthetic construct; identical to SEQ ID NO: 33532
  source 1..80: mol_type = other DNA

SEQ ID NO: 67706 - DNA, 80 bp, synthetic construct; identical to SEQ ID NO: 12271
  source 1..80: mol_type = other DNA

SEQ ID NO: 67707 - DNA, 80 bp, synthetic construct; identical to SEQ ID NO: 33534
  source 1..80: mol_type = other DNA

SEQ ID NO: 67708 - DNA, 80 bp, synthetic construct; identical to SEQ ID NO: 33535
  source 1..80: mol_type = other DNA

SEQ ID NO: 67709 - DNA, 80 bp, synthetic construct; identical to SEQ ID NO: 33536
  source 1..80: mol_type = other DNA

SEQ ID NO: 67710 - DNA, 80 bp, synthetic construct; identical to SEQ ID NO: 33537
  source 1..80: mol_type = other DNA

SEQ ID NO: 67711 - DNA, 80 bp, synthetic construct; identical to SEQ ID NO: 12272
  source 1..80: mol_type = other DNA

SEQ ID NO: 67712 - DNA, 80 bp, synthetic construct; identical to SEQ ID NO: 33539
  source 1..80: mol_type = other DNA

SEQ ID NO: 67713 - DNA, 80 bp, synthetic construct; identical to SEQ ID NO: 33540
  source 1..80: mol_type = other DNA

SEQ ID NO: 67714 - DNA, 80 bp, synthetic construct; identical to SEQ ID NO: 33541
  source 1..80: mol_type = other DNA

SEQ ID NO: 67715 - DNA, 80 bp, synthetic construct; identical to SEQ ID NO: 12273
  source 1..80: mol_type = other DNA

SEQ ID NO: 67716 - DNA, 80 bp, synthetic construct; identical to SEQ ID NO: 33543
  source 1..80: mol_type = other DNA

SEQ ID NO: 67717 - DNA, 80 bp, synthetic construct; identical to SEQ ID NO: 33544
  source 1..80: mol_type = other DNA

SEQ ID NO: 67718 - DNA, 80 bp, synthetic construct; identical to SEQ ID NO: 33545
  source 1..80: mol_type = other DNA

SEQ ID NO: 67719 - DNA, 80 bp, synthetic construct; identical to SEQ ID NO: 12274
  source 1..80: mol_type = other DNA

SEQ ID NO: 67720 - DNA, 80 bp, synthetic construct; identical to SEQ ID NO: 33547
  source 1..80: mol_type = other DNA

SEQ ID NO: 67721 - DNA, 80 bp, synthetic construct; identical to SEQ ID NO: 33548
  source 1..80: mol_type = other DNA

SEQ ID NO: 67722 - DNA, 80 bp, synthetic construct; identical to SEQ ID NO: 33549
  source 1..80: mol_type = other DNA

SEQ ID NO: 67723 - DNA, 80 bp, synthetic construct; identical to SEQ ID NO: 12275
  source 1..80: mol_type = other DNA

SEQ ID NO: 67724 - DNA, 80 bp, synthetic construct; identical to SEQ ID NO: 33551
  source 1..80: mol_type = other DNA

SEQ ID NO: 67725 - DNA, 80 bp, synthetic construct; identical to SEQ ID NO: 33552
  source 1..80: mol_type = other DNA

SEQ ID NO: 67726 - DNA, 80 bp, synthetic construct; identical to SEQ ID NO: 33553
  source 1..80: mol_type = other DNA

SEQ ID NO: 67727 - DNA, 80 bp, synthetic construct; identical to SEQ ID NO: 12276
  source 1..80: mol_type = other DNA

SEQ ID NO: 67728 - DNA, 80 bp, synthetic construct; identical to SEQ ID NO: 33555
  source 1..80: mol_type = other DNA

SEQ ID NO: 67729 - DNA, 80 bp, synthetic construct; identical to SEQ ID NO: 33556
  source 1..80: mol_type = other DNA

SEQ ID NO: 67730 - DNA, 80 bp, synthetic construct; identical to SEQ ID NO: 33557
  source 1..80: mol_type = other DNA

SEQ ID NO: 67731 - DNA, 80 bp, synthetic construct; identical to SEQ ID NO: 12277
  source 1..80: mol_type = other DNA

SEQ ID NO: 67732 - DNA, 80 bp, synthetic construct; identical to SEQ ID NO: 33559
  source 1..80: mol_type = other DNA

SEQ ID NO: 67733 - DNA, 80 bp, synthetic construct; identical to SEQ ID NO: 33560
  source 1..80: mol_type = other DNA

SEQ ID NO: 67734 - DNA, 80 bp, synthetic construct; identical to SEQ ID NO: 33561
  source 1..80: mol_type = other DNA

SEQ ID NO: 67735 - DNA, 80 bp, synthetic construct; identical to SEQ ID NO: 12278
  source 1..80: mol_type = other DNA

SEQ ID NO: 67736 - DNA, 80 bp, synthetic construct; identical to SEQ ID NO: 33563
  source 1..80: mol_type = other DNA

SEQ ID NO: 67737 - DNA, 80 bp, synthetic construct; identical to SEQ ID NO: 33564
  source 1..80: mol_type = other DNA

SEQ ID NO: 67738 - DNA, 80 bp, synthetic construct; identical to SEQ ID NO: 33565
  source 1..80: mol_type = other DNA

SEQ ID NO: 67739 - DNA, 80 bp, synthetic construct; identical to SEQ ID NO: 12279
  source 1..80: mol_type = other DNA

SEQ ID NO: 67740 - DNA, 80 bp, synthetic construct; identical to SEQ ID NO: 33567
  source 1..80: mol_type = other DNA

SEQ ID NO: 67741 - DNA, 80 bp, synthetic construct; identical to SEQ ID NO: 33568
  source 1..80: mol_type = other DNA

SEQ ID NO: 67742 - DNA, 80 bp, synthetic construct; identical to SEQ ID NO: 33569
  source 1..80: mol_type = other DNA

SEQ ID NO: 67743 - DNA, 80 bp, synthetic construct; identical to SEQ ID NO: 12280
  source 1..80: mol_type = other DNA

SEQ ID NO: 67744 - DNA, 80 bp, synthetic construct; identical to SEQ ID NO: 33571
  source 1..80: mol_type = other DNA

SEQ ID NO: 67745 - DNA, 80 bp, synthetic construct; identical to SEQ ID NO: 33572
  source 1..80: mol_type = other DNA

SEQ ID NO: 67746 - DNA, 80 bp, synthetic construct; identical to SEQ ID NO: 12281
  source 1..80: mol_type = other DNA

SEQ ID NO: 67747 - DNA, 80 bp, synthetic construct; identical to SEQ ID NO: 33574
  source 1..80: mol_type = other DNA

SEQ ID NO: 67748 - DNA, 80 bp, synthetic construct; identical to SEQ ID NO: 33575
  source 1..80: mol_type = other DNA

SEQ ID NO: 67749 - DNA, 80 bp, synthetic construct; identical to SEQ ID NO: 33576
  source 1..80: mol_type = other DNA

SEQ ID NO: 67750 - DNA, 80 bp, synthetic construct; identical to SEQ ID NO: 12282
  source 1..80: mol_type = other DNA

SEQ ID NO: 67751 - DNA, 80 bp, synthetic construct; identical to SEQ ID NO: 33579
  source 1..80: mol_type = other DNA

SEQ ID NO: 67752 - DNA, 80 bp, synthetic construct; identical to SEQ ID NO: 33580
  source 1..80: mol_type = other DNA

SEQ ID NO: 67753 - DNA, 80 bp, synthetic construct; identical to SEQ ID NO: 12283
  source 1..80: mol_type = other DNA

SEQ ID NO: 67754 - DNA, 80 bp, synthetic construct; identical to SEQ ID NO: 33582
  source 1..80: mol_type = other DNA

SEQ ID NO: 67755 - DNA, 80 bp, synthetic construct; identical to SEQ ID NO: 33583
  source 1..80: mol_type = other DNA

SEQ ID NO: 67756 - DNA, 80 bp, synthetic construct; identical to SEQ ID NO: 33584
  source 1..80: mol_type = other DNA

SEQ ID NO: 67757 - DNA, 80 bp, synthetic construct; identical to SEQ ID NO: 12284
  source 1..80: mol_type = other DNA

SEQ ID NO: 67758 - DNA, 80 bp, synthetic construct; identical to SEQ ID NO: 33586
  source 1..80: mol_type = other DNA

SEQ ID NO: 67759 - DNA, 80 bp, synthetic construct; identical to SEQ ID NO: 33587
  source 1..80: mol_type = other DNA

SEQ ID NO: 67760 - DNA, 80 bp, synthetic construct; identical to SEQ ID NO: 12289
  source 1..80: mol_type = other DNA

SEQ ID NO: 67761 - DNA, 80 bp, synthetic construct; identical to SEQ ID NO: 33589
  source 1..80: mol_type = other DNA

SEQ ID NO: 67762 - DNA, 80 bp, synthetic construct; identical to SEQ ID NO: 33590
  source 1..80: mol_type = other DNA

SEQ ID NO: 67763 - DNA, 80 bp, synthetic construct; identical to SEQ ID NO: 33591
  source 1..80: mol_type = other DNA

SEQ ID NO: 67764 - DNA, 80 bp, synthetic construct; identical to SEQ ID NO: 33592
  source 1..80: mol_type = other DNA

SEQ ID NO: 67765 - DNA, 80 bp, synthetic construct; identical to SEQ ID NO: 12290
  source 1..80: mol_type = other DNA

SEQ ID NO: 67766 - DNA, 80 bp, synthetic construct; identical to SEQ ID NO: 33594
  source 1..80: mol_type = other DNA

SEQ ID NO: 67767 - DNA, 80 bp, synthetic construct; identical to SEQ ID NO: 33595
  source 1..80: mol_type = other DNA

SEQ ID NO: 67768 - DNA, 80 bp, synthetic construct; identical to SEQ ID NO: 33596
  source 1..80: mol_type = other DNA

SEQ ID NO: 67769 - DNA, 80 bp, synthetic construct; identical to SEQ ID NO: 33597
  source 1..80: mol_type = other DNA

SEQ ID NO: 67770 - DNA, 80 bp, synthetic construct; identical to SEQ ID NO: 12291
  source 1..80: mol_type = other DNA

SEQ ID NO: 67771 - DNA, 80 bp, synthetic construct; identical to SEQ ID NO: 33599
  source 1..80: mol_type = other DNA

SEQ ID NO: 67772 - DNA, 80 bp, synthetic construct; identical to SEQ ID NO: 33600
  source 1..80: mol_type = other DNA

SEQ ID NO: 67773 - DNA, 80 bp, synthetic construct; identical to SEQ ID NO: 12292
  source 1..80: mol_type = other DNA

SEQ ID NO: 67774 - DNA, 80 bp, synthetic construct; identical to SEQ ID NO: 33602
  source 1..80: mol_type = other DNA

SEQ ID NO: 67775 - DNA, 80 bp, synthetic construct; identical to SEQ ID NO: 33603
  source 1..80: mol_type = other DNA

SEQ ID NO: 67776 - DNA, 80 bp, synthetic construct; identical to SEQ ID NO: 33604
  source 1..80: mol_type = other DNA

SEQ ID NO: 67777 - DNA, 80 bp, synthetic construct; identical to SEQ ID NO: 12293
  source 1..80: mol_type = other DNA

SEQ ID NO: 67778 - DNA, 80 bp, synthetic construct; identical to SEQ ID NO: 33606
  source 1..80: mol_type = other DNA

SEQ ID NO: 67779 - DNA, 80 bp, synthetic construct; identical to SEQ ID NO: 33607
  source 1..80: mol_type = other DNA

SEQ ID NO: 67780 - DNA, 80 bp, synthetic construct; identical to SEQ ID NO: 33608
  source 1..80: mol_type = other DNA

SEQ ID NO: 67781 - DNA, 80 bp, synthetic construct; identical to SEQ ID NO: 33609
  source 1..80: mol_type = other DNA

SEQ ID NO: 67782 - DNA, 80 bp, synthetic construct; identical to SEQ ID NO: 12294
  source 1..80: mol_type = other DNA

SEQ ID NO: 67783 - DNA, 80 bp, synthetic construct; identical to SEQ ID NO: 33611
  source 1..80: mol_type = other DNA

SEQ ID NO: 67784 - DNA, 80 bp, synthetic construct; identical to SEQ ID NO: 33612
  source 1..80: mol_type = other DNA

SEQ ID NO: 67785 - DNA, 80 bp, synthetic construct; identical to SEQ ID NO: 12295
  source 1..80: mol_type = other DNA

SEQ ID NO: 67786 - DNA, 80 bp, synthetic construct; identical to SEQ ID NO: 33614
  source 1..80: mol_type = other DNA

SEQ ID NO: 67787 - DNA, 80 bp, synthetic construct; identical to SEQ ID NO: 33615
  source 1..80: mol_type = other DNA

SEQ ID NO: 67788 - DNA, 80 bp, synthetic construct; identical to SEQ ID NO: 33616
  source 1..80: mol_type = other DNA

SEQ ID NO: 67789 - DNA, 80 bp, synthetic construct; identical to SEQ ID NO: 12296
  source 1..80: mol_type = other DNA

SEQ ID NO: 67790 - DNA, 80 bp, synthetic construct; identical to SEQ ID NO: 33618
  source 1..80: mol_type = other DNA

SEQ ID NO: 67791 - DNA, 80 bp, synthetic construct; identical to SEQ ID NO: 33619
  source 1..80: mol_type = other DNA

SEQ ID NO: 67792 - DNA, 80 bp, synthetic construct; identical to SEQ ID NO: 33620
  source 1..80: mol_type = other DNA

SEQ ID NO: 67793 - DNA, 80 bp, synthetic construct; identical to SEQ ID NO: 33621
  source 1..80: mol_type = other DNA

SEQ ID NO: 67794 - DNA, 80 bp, synthetic construct; identical to SEQ ID NO: 12297
  source 1..80: mol_type = other DNA

SEQ ID NO: 67795 - DNA, 80 bp, synthetic construct; identical to SEQ ID NO: 33623
  source 1..80: mol_type = other DNA

SEQ ID NO: 67796 - DNA, 80 bp, synthetic construct; identical to SEQ ID NO: 33624
  source 1..80: mol_type = other DNA

SEQ ID NO: 67797 - DNA, 80 bp, synthetic construct; identical to SEQ ID NO: 33625
  source 1..80: mol_type = other DNA

SEQ ID NO: 67798 - DNA, 80 bp, synthetic construct; identical to SEQ ID NO: 12298
  source 1..80: mol_type = other DNA

SEQ ID NO: 67799 - DNA, 80 bp, synthetic construct; identical to SEQ ID NO: 33627
  source 1..80: mol_type = other DNA

SEQ ID NO: 67800 - DNA, 80 bp, synthetic construct; identical to SEQ ID NO: 33628
  source 1..80: mol_type = other DNA

SEQ ID NO: 67801 - DNA, 80 bp, synthetic construct; identical to SEQ ID NO: 33629
  source 1..80: mol_type = other DNA

SEQ ID NO: 67802 - DNA, 80 bp, synthetic construct; identical to SEQ ID NO: 12299
  source 1..80: mol_type = other DNA

SEQ ID NO: 67803 - DNA, 80 bp, synthetic construct; identical to SEQ ID NO: 33631
  source 1..80: mol_type = other DNA

SEQ ID NO: 67804 - DNA, 80 bp, synthetic construct; identical to SEQ ID NO: 33632
  source 1..80: mol_type = other DNA

SEQ ID NO: 67805 - DNA, 80 bp, synthetic construct; identical to SEQ ID NO: 12300
  source 1..80: mol_type = other DNA

SEQ ID NO: 67806 - DNA, 80 bp, synthetic construct; identical to SEQ ID NO: 33635
  source 1..80: mol_type = other DNA

SEQ ID NO: 67807 - DNA, 80 bp, synthetic construct; identical to SEQ ID NO: 12301
  source 1..80: mol_type = other DNA

SEQ ID NO: 67808 - DNA, 80 bp, synthetic construct; identical to SEQ ID NO: 33638
  source 1..80: mol_type = other DNA

SEQ ID NO: 67809 - DNA, 80 bp, synthetic construct; identical to SEQ ID NO: 33639
  source 1..80: mol_type = other DNA

SEQ ID NO: 67810 - DNA, 80 bp, synthetic construct; identical to SEQ ID NO: 33640
  source 1..80: mol_type = other DNA

SEQ ID NO: 67811 - DNA, 80 bp, synthetic construct; identical to SEQ ID NO: 33641
  source 1..80: mol_type = other DNA

SEQ ID NO: 67812 - DNA, 80 bp, synthetic construct; identical to SEQ ID NO: 12302
  source 1..80: mol_type = other DNA

SEQ ID NO: 67813 - DNA, 80 bp, synthetic construct; identical to SEQ ID NO: 33643
  source 1..80: mol_type = other DNA

SEQ ID NO: 67814 - DNA, 80 bp, synthetic construct; identical to SEQ ID NO: 33644
  source 1..80: mol_type = other DNA

SEQ ID NO: 67815 - DNA, 80 bp, synthetic construct; identical to SEQ ID NO: 12303
  source 1..80: mol_type = other DNA

SEQ ID NO: 67816 - DNA, 80 bp, synthetic construct; identical to SEQ ID NO: 33646
  source 1..80: mol_type = other DNA

SEQ ID NO: 67817 - DNA, 80 bp, synthetic construct; identical to SEQ ID NO: 33647
  source 1..80: mol_type = other DNA

SEQ ID NO: 67818 - DNA, 80 bp, synthetic construct; identical to SEQ ID NO: 33648
  source 1..80: mol_type = other DNA

SEQ ID NO: 67819 - DNA, 80 bp, synthetic construct; identical to SEQ ID NO: 12304
  source 1..80: mol_type = other DNA

SEQ ID NO: 67820 - DNA, 80 bp, synthetic construct; identical to SEQ ID NO: 33651
  source 1..80: mol_type = other DNA

SEQ ID NO: 67821 - DNA, 80 bp, synthetic construct; identical to SEQ ID NO: 33652
  source 1..80: mol_type = other DNA

SEQ ID NO: 67822 - DNA, 80 bp, synthetic construct; identical to SEQ ID NO: 12305
  source 1..80: mol_type = other DNA

SEQ ID NO: 67823 - DNA, 80 bp, synthetic construct; identical to SEQ ID NO: 33654
  source 1..80: mol_type = other DNA

SEQ ID NO: 67824 - DNA, 80 bp, synthetic construct; identical to SEQ ID NO: 33655
  source 1..80: mol_type = other DNA

SEQ ID NO: 67825 - DNA, 80 bp, synthetic construct; identical to SEQ ID NO: 33656
  source 1..80: mol_type = other DNA

SEQ ID NO: 67826 - DNA, 80 bp, synthetic construct; identical to SEQ ID NO: 33657
  source 1..80: mol_type = other DNA

SEQ ID NO: 67827 - DNA, 80 bp, synthetic construct; identical to SEQ ID NO: 12306
  source 1..80: mol_type = other DNA

SEQ ID NO: 67828 - DNA, 80 bp, synthetic construct; identical to SEQ ID NO: 33659
  source 1..80: mol_type = other DNA

SEQ ID NO: 67829 - DNA, 80 bp, synthetic construct; identical to SEQ ID NO: 33660
  source 1..80: mol_type = other DNA

SEQ ID NO: 67830 - DNA, 80 bp, synthetic construct; identical to SEQ ID NO: 12307
  source 1..80: mol_type = other DNA

SEQ ID NO: 67831 - DNA, 80 bp, synthetic construct; identical to SEQ ID NO: 33662
  source 1..80: mol_type = other DNA

SEQ ID NO: 67832 - DNA, 80 bp, synthetic construct; identical to SEQ ID NO: 33663
  source 1..80: mol_type = other DNA

SEQ ID NO: 67833 - DNA, 80 bp, synthetic construct; identical to SEQ ID NO: 33664
  source 1..80: mol_type = other DNA

SEQ ID NO: 67834 - DNA, 80 bp, synthetic construct; identical to SEQ ID NO: 33665
  source 1..80: mol_type = other DNA

SEQ ID NO: 67835 - DNA, 80 bp, synthetic construct; identical to SEQ ID NO: 12308
  source 1..80: mol_type = other DNA

SEQ ID NO: 67836 - DNA, 80 bp, synthetic construct; identical to SEQ ID NO: 33667
  source 1..80: mol_type = other DNA

SEQ ID NO: 67837 - DNA, 80 bp, synthetic construct; identical to SEQ ID NO: 33668
  source 1..80: mol_type = other DNA

SEQ ID NO: 67838 - DNA, 80 bp, synthetic construct; identical to SEQ ID NO: 33669
  source 1..80: mol_type = other DNA

SEQ ID NO: 67839 - DNA, 80 bp, synthetic construct; identical to SEQ ID NO: 33670
  source 1..80: mol_type = other DNA

SEQ ID NO: 67840 - DNA, 80 bp, synthetic construct; identical to SEQ ID NO: 12309
  source 1..80: mol_type = other DNA

SEQ ID NO: 67841 - DNA, 80 bp, synthetic construct; identical to SEQ ID NO: 33672
  source 1..80: mol_type = other DNA

SEQ ID NO: 67842 - DNA, 80 bp, synthetic construct; identical to SEQ ID NO: 33673
  source 1..80: mol_type = other DNA

SEQ ID NO: 67843 - DNA, 80 bp, synthetic construct; identical to SEQ ID NO: 33674
  source 1..80: mol_type = other DNA

SEQ ID NO: 67844 - DNA, 80 bp, synthetic construct; identical to SEQ ID NO: 12310
  source 1..80: mol_type = other DNA

SEQ ID NO: 67845 - DNA, 80 bp, synthetic construct; identical to SEQ ID NO: 33676
  source 1..80: mol_type = other DNA

SEQ ID NO: 67846 - DNA, 80 bp, synthetic construct; identical to SEQ ID NO: 33677
  source 1..80: mol_type = other DNA

SEQ ID NO: 67847 - DNA, 80 bp, synthetic construct; identical to SEQ ID NO: 12311
  source 1..80: mol_type = other DNA

SEQ ID NO: 67848 - DNA, 80 bp, synthetic construct; identical to SEQ ID NO: 33679
  source 1..80: mol_type = other DNA

SEQ ID NO: 67849 - DNA, 80 bp, synthetic construct; identical to SEQ ID NO: 33680
  source 1..80: mol_type = other DNA

SEQ ID NO: 67850 - DNA, 80 bp, synthetic construct; identical to SEQ ID NO: 33681
  source 1..80: mol_type = other DNA

SEQ ID NO: 67851 - DNA, 80 bp, synthetic construct; identical to SEQ ID NO: 33682
  source 1..80: mol_type = other DNA

SEQ ID NO: 67852 - DNA, 80 bp, synthetic construct; identical to SEQ ID NO: 12312
  source 1..80: mol_type = other DNA

SEQ ID NO: 67853 - DNA, 80 bp, synthetic construct; identical to SEQ ID NO: 33684
  source 1..80: mol_type = other DNA

SEQ ID NO: 67854 - DNA, 80 bp, synthetic construct; identical to SEQ ID NO: 33685
  source 1..80: mol_type = other DNA

SEQ ID NO: 67855 - DNA, 80 bp, synthetic construct; identical to SEQ ID NO: 33686
  source 1..80: mol_type = other DNA

SEQ ID NO: 67856 - DNA, 80 bp, synthetic construct; identical to SEQ ID NO: 33687
  source 1..80: mol_type = other DNA

SEQ ID NO: 67857 - DNA, 80 bp, synthetic construct; identical to SEQ ID NO: 12313
  source 1..80: mol_type = other DNA

SEQ ID NO: 67858 - DNA, 80 bp, synthetic construct; identical to SEQ ID NO: 33689
  source 1..80: mol_type = other DNA

SEQ ID NO: 67859 - DNA, 80 bp, synthetic construct; identical to SEQ ID NO: 33690
  source 1..80: mol_type = other DNA

SEQ ID NO: 67860 - DNA, 80 bp, synthetic construct; identical to SEQ ID NO: 33691
  source 1..80: mol_type = other DNA

SEQ ID NO: 67861 - DNA, 80 bp, synthetic construct; identical to SEQ ID NO: 12314
  source 1..80: mol_type = other DNA

SEQ ID NO: 67862 - DNA, 80 bp, synthetic construct; identical to SEQ ID NO: 33693
  source 1..80: mol_type = other DNA

SEQ ID NO: 67863 - DNA, 80 bp, synthetic construct; identical to SEQ ID NO: 33694
  source 1..80: mol_type = other DNA

SEQ ID NO: 67864 - DNA, 80 bp, synthetic construct; identical to SEQ ID NO: 33695
  source 1..80: mol_type = other DNA

SEQ ID NO: 67865 - DNA, 80 bp, synthetic construct; identical to SEQ ID NO: 33696
  source 1..80: mol_type = other DNA

SEQ ID NO: 67866 - DNA, 80 bp, synthetic construct; identical to SEQ ID NO: 12315
  source 1..80: mol_type = other DNA

SEQ ID NO: 67867 - DNA, 80 bp, synthetic construct; identical to SEQ ID NO: 33698
  source 1..80: mol_type = other DNA

SEQ ID NO: 67868 - DNA, 80 bp, synthetic construct; identical to SEQ ID NO: 33699
  source 1..80: mol_type = other DNA

SEQ ID NO: 67869 - DNA, 80 bp, synthetic construct; identical to SEQ ID NO: 12316
  source 1..80: mol_type = other DNA

SEQ ID NO: 67870 - DNA, 80 bp, synthetic construct; identical to SEQ ID NO: 33701
  source 1..80: mol_type = other DNA

SEQ ID NO: 67871 - DNA, 80 bp, synthetic construct; identical to SEQ ID NO: 33702
  source 1..80: mol_type = other DNA

SEQ ID NO: 67872 - DNA, 80 bp, synthetic construct; identical to SEQ ID NO: 33703
  source 1..80: mol_type = other DNA

SEQ ID NO: 67873 - DNA, 80 bp, synthetic construct; identical to SEQ ID NO: 33704
  source 1..80: mol_type = other DNA

SEQ ID NO: 67874 - DNA, 80 bp, synthetic construct; identical to SEQ ID NO: 12317
  source 1..80: mol_type = other DNA

SEQ ID NO: 67875 - DNA, 80 bp, synthetic construct; identical to SEQ ID NO: 33707
  source 1..80: mol_type = other DNA

SEQ ID NO: 67876 - DNA, 80 bp, synthetic construct; identical to SEQ ID NO: 12318
  source 1..80: mol_type = other DNA

SEQ ID NO: 67877 - DNA, 80 bp, synthetic construct; identical to SEQ ID NO: 33710
  source 1..80: mol_type = other DNA

SEQ ID NO: 67878 - DNA, 80 bp, synthetic construct; identical to SEQ ID NO: 33711
  source 1..80: mol_type = other DNA

SEQ ID NO: 67879 - DNA, 80 bp, synthetic construct; identical to SEQ ID NO: 33712
  source 1..80: mol_type = other DNA

SEQ ID NO: 67880 - DNA, 80 bp, synthetic construct; identical to SEQ ID NO: 12319
  source 1..80: mol_type = other DNA

SEQ ID NO: 67881 - DNA, 80 bp, synthetic construct; identical to SEQ ID NO: 33714
  source 1..80: mol_type = other DNA

SEQ ID NO: 67882 - DNA, 80 bp, synthetic construct; identical to SEQ ID NO: 33715
  source 1..80: mol_type = other DNA

SEQ ID NO: 67883 - DNA, 80 bp, synthetic construct; identical to SEQ ID NO: 33716
  source 1..80: mol_type = other DNA

SEQ ID NO: 67884 - DNA, 80 bp, synthetic construct; identical to SEQ ID NO: 12320
  source 1..80: mol_type = other DNA

SEQ ID NO: 67885 - DNA, 80 bp, synthetic construct; identical to SEQ ID NO: 33718
  source 1..80: mol_type = other DNA

SEQ ID NO: 67886 - DNA, 80 bp, synthetic construct; identical to SEQ ID NO: 33719
  source 1..80: mol_type = other DNA

SEQ ID NO: 67887 - DNA, 80 bp, synthetic construct; identical to SEQ ID NO: 33720
  source 1..80: mol_type = other DNA

SEQ ID NO: 67888 - DNA, 80 bp, synthetic construct; identical to SEQ ID NO: 12321
  source 1..80: mol_type = other DNA

SEQ ID NO: 67889 - DNA, 80 bp, synthetic construct; identical to SEQ ID NO: 33722
  source 1..80: mol_type = other DNA

SEQ ID NO: 67890 - DNA, 80 bp, synthetic construct; identical to SEQ ID NO: 33723
  source 1..80: mol_type = other DNA

SEQ ID NO: 67891 - DNA, 80 bp, synthetic construct; identical to SEQ ID NO: 33724
  source 1..80: mol_type = other DNA

SEQ ID NO: 67892 - DNA, 80 bp, synthetic construct; identical to SEQ ID NO: 12322
  source 1..80: mol_type = other DNA

SEQ ID NO: 67893 - DNA, 80 bp, synthetic construct; identical to SEQ ID NO: 33726
  source 1..80: mol_type = other DNA

SEQ ID NO: 67894 - DNA, 80 bp, synthetic construct; identical to SEQ ID NO: 33727
  source 1..80: mol_type = other DNA

SEQ ID NO: 67895 - DNA, 80 bp, synthetic construct; identical to SEQ ID NO: 33728
  source 1..80: mol_type = other DNA

SEQ ID NO: 67896 - DNA, 80 bp, synthetic construct; identical to SEQ ID NO: 12323
  source 1..80: mol_type = other DNA

SEQ ID NO: 67897 - DNA, 80 bp, synthetic construct; identical to SEQ ID NO: 33730
  source 1..80: mol_type = other DNA

SEQ ID NO: 67898 - DNA, 80 bp, synthetic construct; identical to SEQ ID NO: 33731
  source 1..80: mol_type = other DNA

SEQ ID NO: 67899 - DNA, 80 bp, synthetic construct; identical to SEQ ID NO: 33732
  source 1..80: mol_type = other DNA

SEQ ID NO: 67900 - DNA, 80 bp, synthetic construct; identical to SEQ ID NO: 33733
  source 1..80: mol_type = other DNA

SEQ ID NO: 67901 - DNA, 80 bp, synthetic construct; identical to SEQ ID NO: 12324
  source 1..80: mol_type = other DNA

SEQ ID NO: 67902 - DNA, 80 bp, synthetic construct; identical to SEQ ID NO: 33735
  source 1..80: mol_type = other DNA

SEQ ID NO: 67903 - DNA, 80 bp, synthetic construct; identical to SEQ ID NO: 33736
  source 1..80: mol_type = other DNA

SEQ ID NO: 67904 - DNA, 80 bp, synthetic construct; identical to SEQ ID NO: 33737
  source 1..80: mol_type = other DNA

SEQ ID NO: 67905 - DNA, 80 bp, synthetic construct; identical to SEQ ID NO: 12325
  source 1..80: mol_type = other DNA

SEQ ID NO: 67906 - DNA, 80 bp, synthetic construct; identical to SEQ ID NO: 33739
  source 1..80: mol_type = other DNA

SEQ ID NO: 67907 - DNA, 80 bp, synthetic construct; identical to SEQ ID NO: 33740
  source 1..80: mol_type = other DNA

SEQ ID NO: 67908 - DNA, 80 bp, synthetic construct; identical to SEQ ID NO: 33741
  source 1..80: mol_type = other DNA

SEQ ID NO: 67909 - DNA, 80 bp, synthetic construct; identical to SEQ ID NO: 33742
  source 1..80: mol_type = other DNA

SEQ ID NO: 67910 - DNA, 80 bp, synthetic construct; identical to SEQ ID NO: 12327
  source 1..80: mol_type = other DNA

SEQ ID NO: 67911 - DNA, 80 bp, synthetic construct; identical to SEQ ID NO: 33744
  source 1..80: mol_type = other DNA

SEQ ID NO: 67912 - DNA, 80 bp, synthetic construct; identical to SEQ ID NO: 33745
  source 1..80: mol_type = other DNA

SEQ ID NO: 67913 - DNA, 80 bp, synthetic construct; identical to SEQ ID NO: 33746
  source 1..80: mol_type = other DNA

SEQ ID NO: 67914 - DNA, 80 bp, synthetic construct; identical to SEQ ID NO: 12328
  source 1..80: mol_type = other DNA

SEQ ID NO: 67915 - DNA, 80 bp, synthetic construct; identical to SEQ ID NO: 33748
  source 1..80: mol_type = other DNA

SEQ ID NO: 67916 - DNA, 80 bp, synthetic construct; identical to SEQ ID NO: 33749
  source 1..80: mol_type = other DNA

SEQ ID NO: 67917 - DNA, 80 bp, synthetic construct; identical to SEQ ID NO: 33750
  source 1..80: mol_type = other DNA

SEQ ID NO: 67918 - DNA, 80 bp, synthetic construct; identical to SEQ ID NO: 33751
  source 1..80: mol_type = other DNA

SEQ ID NO: 67919 - DNA, 80 bp, synthetic construct; identical to SEQ ID NO: 12329
  source 1..80: mol_type = other DNA

SEQ ID NO: 67920 - DNA, 80 bp, synthetic construct; identical to SEQ ID NO: 33753
  source 1..80: mol_type = other DNA

SEQ ID NO: 67921 - DNA, 80 bp, synthetic construct; identical to SEQ ID NO: 33754
  source 1..80: mol_type = other DNA

SEQ ID NO: 67922 - DNA, 80 bp, synthetic construct; identical to SEQ ID NO: 12330
  source 1..80: mol_type = other DNA

SEQ ID NO: 67923 - DNA, 80 bp, synthetic construct; identical to SEQ ID NO: 33756
  source 1..80: mol_type = other DNA

SEQ ID NO: 67924 - DNA, 80 bp, synthetic construct; identical to SEQ ID NO: 33757
  source 1..80: mol_type = other DNA

SEQ ID NO: 67925 - DNA, 80 bp, synthetic construct; identical to SEQ ID NO: 33758
  source 1..80: mol_type = other DNA

SEQ ID NO: 67926 - DNA, 80 bp, synthetic construct; identical to SEQ ID NO: 33759
  source 1..80: mol_type = other DNA

SEQ ID NO: 67927 - DNA, 80 bp, synthetic construct; identical to SEQ ID NO: 12331
  source 1..80: mol_type = other DNA

SEQ ID NO: 67928 - DNA, 80 bp, synthetic construct; identical to SEQ ID NO: 33761
  source 1..80: mol_type = other DNA

SEQ ID NO: 67929 - DNA, 80 bp, synthetic construct; identical to SEQ ID NO: 33762
  source 1..80: mol_type = other DNA

SEQ ID NO: 67930 - DNA, 80 bp, synthetic construct; identical to SEQ ID NO: 33763
  source 1..80: mol_type = other DNA

SEQ ID NO: 67931 - DNA, 80 bp, synthetic construct; identical to SEQ ID NO: 12332
  source 1..80: mol_type = other DNA

SEQ ID NO: 67932 - DNA, 80 bp, synthetic construct; identical to SEQ ID NO: 33765
  source 1..80: mol_type = other DNA

SEQ ID NO: 67933 - DNA, 80 bp, synthetic construct; identical to SEQ ID NO: 33766
  source 1..80: mol_type = other DNA

SEQ ID NO: 67934 - DNA, 80 bp, synthetic construct; identical to SEQ ID NO: 12333
  source 1..80: mol_type = other DNA

SEQ ID NO: 67935 - DNA, 80 bp, synthetic construct; identical to SEQ ID NO: 33768
  source 1..80: mol_type = other DNA

SEQ ID NO: 67936 - DNA, 80 bp, synthetic construct; identical to SEQ ID NO: 33769
  source 1..80: mol_type = other DNA

SEQ ID NO: 67937 - DNA, 80 bp, synthetic construct; identical to SEQ ID NO: 33770
  source 1..80: mol_type = other DNA

SEQ ID NO: 67938 - DNA, 80 bp, synthetic construct; identical to SEQ ID NO: 33771
  source 1..80: mol_type = other DNA

SEQ ID NO: 67939 - DNA, 80 bp, synthetic construct; identical to SEQ ID NO: 12334
  source 1..80: mol_type = other DNA

SEQ ID NO: 67940 - DNA, 80 bp, synthetic construct; identical to SEQ ID NO: 33773
  source 1..80: mol_type = other DNA

SEQ ID NO: 67941 - DNA, 80 bp, synthetic construct; identical to SEQ ID NO: 33774
  source 1..80: mol_type = other DNA

SEQ ID NO: 67942 - DNA, 80 bp, synthetic construct; identical to SEQ ID NO: 33775
  source 1..80: mol_type = other DNA

SEQ ID NO: 67943 - DNA, 80 bp, synthetic construct; identical to SEQ ID NO: 33776
  source 1..80: mol_type = other DNA

SEQ ID NO: 67944 - DNA, 80 bp, synthetic construct; identical to SEQ ID NO: 12335
  source 1..80: mol_type = other DNA

SEQ ID NO: 67945 - DNA, 80 bp, synthetic construct; identical to SEQ ID NO: 33778
  source 1..80: mol_type = other DNA

SEQ ID NO: 67946 - DNA, 80 bp, synthetic construct; identical to SEQ ID NO: 33779
  source 1..80: mol_type = other DNA

SEQ ID NO: 67947 - DNA, 80 bp, synthetic construct; identical to SEQ ID NO: 12336
  source 1..80: mol_type = other DNA

SEQ ID NO: 67948 - DNA, 80 bp, synthetic construct; identical to SEQ ID NO: 33781
  source 1..80: mol_type = other DNA

SEQ ID NO: 67949 - DNA, 80 bp, synthetic construct; identical to SEQ ID NO: 33782
  source 1..80: mol_type = other DNA

SEQ ID NO: 67950 - DNA, 80 bp, synthetic construct; identical to SEQ ID NO: 33783
  source 1..80: mol_type = other DNA

SEQ ID NO: 67951 - DNA, 80 bp, synthetic construct; identical to SEQ ID NO: 12337
  source 1..80: mol_type = other DNA

SEQ ID NO: 67952 - DNA, 80 bp, synthetic construct; identical to SEQ ID NO: 33785
  source 1..80: mol_type = other DNA

SEQ ID NO: 67953 - DNA, 80 bp, synthetic construct; identical to SEQ ID NO: 33786
  source 1..80: mol_type = other DNA

SEQ ID NO: 67954 - DNA, 80 bp, synthetic construct; identical to SEQ ID NO: 33787
  source 1..80: mol_type = other DNA

SEQ ID NO: 67955 - DNA, 80 bp, synthetic construct; identical to SEQ ID NO: 12338
  source 1..80: mol_type = other DNA

SEQ ID NO: 67956 - DNA, 80 bp, synthetic construct; identical to SEQ ID NO: 33790
  source 1..80: mol_type = other DNA

SEQ ID NO: 67957 - DNA, 80 bp, synthetic construct; identical to SEQ ID NO: 33791
  source 1..80: mol_type = other DNA

SEQ ID NO: 67958 - DNA, 80 bp, synthetic construct; identical to SEQ ID NO: 33792
  source 1..80: mol_type = other DNA

SEQ ID NO: 67959 - DNA, 80 bp, synthetic construct; identical to SEQ ID NO: 12339
  source 1..80: mol_type = other DNA

SEQ ID NO: 67960 - DNA, 80 bp, synthetic construct; identical to SEQ ID NO: 33794
  source 1..80: mol_type = other DNA

SEQ ID NO: 67961 - DNA, 80 bp, synthetic construct; identical to SEQ ID NO: 33795
  source 1..80: mol_type = other DNA

SEQ ID NO: 67962 - DNA, 80 bp, synthetic construct; identical to SEQ ID NO: 12340
  source 1..80: mol_type = other DNA

SEQ ID NO: 67963 - DNA, 80 bp, synthetic construct; identical to SEQ ID NO: 33797
  source 1..80: mol_type = other DNA

SEQ ID NO: 67964 - DNA, 80 bp, synthetic construct; identical to SEQ ID NO: 33798
  source 1..80: mol_type = other DNA

SEQ ID NO: 67965 - DNA, 80 bp, synthetic construct; identical to SEQ ID NO: 33799
  source 1..80: mol_type = other DNA

SEQ ID NO: 67966 - DNA, 80 bp, synthetic construct; identical to SEQ ID NO: 12341
  source 1..80: mol_type = other DNA

SEQ ID NO: 67967 - DNA, 80 bp, synthetic construct; identical to SEQ ID NO: 33801
  source 1..80: mol_type = other DNA

SEQ ID NO: 67968 - DNA, 80 bp, synthetic construct; identical to SEQ ID NO: 33802
  source 1..80: mol_type = other DNA

SEQ ID NO: 67969 - DNA, 80 bp, synthetic construct; identical to SEQ ID NO: 33803
  source 1..80: mol_type = other DNA

SEQ ID NO: 67970 - DNA, 80 bp, synthetic construct; identical to SEQ ID NO: 12342
  source 1..80: mol_type = other DNA

SEQ ID NO: 67971 - DNA, 80 bp, synthetic construct; identical to SEQ ID NO: 33805
  source 1..80: mol_type = other DNA

SEQ ID NO: 67972 - DNA, 80 bp, synthetic construct; identical to SEQ ID NO: 33806
  source 1..80: mol_type = other DNA

SEQ ID NO: 67973 - DNA, 80 bp, synthetic construct; identical to SEQ ID NO: 33807
  source 1..80: mol_type = other DNA

SEQ ID NO: 67974 - DNA, 80 bp, synthetic construct; identical to SEQ ID NO: 12343
  source 1..80: mol_type = other DNA

SEQ ID NO: 67975 - DNA, 80 bp, synthetic construct; identical to SEQ ID NO: 33809
  source 1..80: mol_type = other DNA

SEQ ID NO: 67976 - DNA, 80 bp, synthetic construct; identical to SEQ ID NO: 33810
  source 1..80: mol_type = other DNA

SEQ ID NO: 67977 - DNA, 80 bp, synthetic construct; identical to SEQ ID NO: 33811
  source 1..80: mol_type = other DNA

SEQ ID NO: 67978 - DNA, 80 bp, synthetic construct; identical to SEQ ID NO: 12344
  source 1..80: mol_type = other DNA

SEQ ID NO: 67979 - DNA, 80 bp, synthetic construct; identical to SEQ ID NO: 33813
  source 1..80: mol_type = other DNA

SEQ ID NO: 67980 - DNA, 80 bp, synthetic construct; identical to SEQ ID NO: 33814
  source 1..80: mol_type = other DNA

SEQ ID NO: 67981 - DNA, 80 bp, synthetic construct; identical to SEQ ID NO: 33815
  source 1..80: mol_type = other DNA

SEQ ID NO: 67982 - DNA, 80 bp, synthetic construct; identical to SEQ ID NO: 12345
  source 1..80: mol_type = other DNA

SEQ ID NO: 67983 - DNA, 80 bp, synthetic construct; identical to SEQ ID NO: 33817
  source 1..80: mol_type = other DNA

SEQ ID NO: 67984 - DNA, 80 bp, synthetic construct; identical to SEQ ID NO: 33818
  source 1..80: mol_type = other DNA

SEQ ID NO: 67985 - DNA, 80 bp, synthetic construct; identical to SEQ ID NO: 33819
  source 1..80: mol_type = other DNA

SEQ ID NO: 67986 - DNA, 80 bp, synthetic construct; identical to SEQ ID NO: 12346
  source 1..80: mol_type = other DNA

SEQ ID NO: 67987 - DNA, 80 bp, synthetic construct; identical to SEQ ID NO: 33821
  source 1..80: mol_type = other DNA

SEQ ID NO: 67988 - DNA, 80 bp, synthetic construct; identical to SEQ ID NO: 33822
  source 1..80: mol_type = other DNA

SEQ ID NO: 67989 - DNA, 80 bp, synthetic construct; identical to SEQ ID NO: 33823
  source 1..80: mol_type = other DNA

SEQ ID NO: 67990 - DNA, 80 bp, synthetic construct; identical to SEQ ID NO: 33824
  source 1..80: mol_type = other DNA

SEQ ID NO: 67991 - DNA, 80 bp, synthetic construct; identical to SEQ ID NO: 12347
  source 1..80: mol_type = other DNA

SEQ ID NO: 67992 - DNA, 80 bp, synthetic construct; identical to SEQ ID NO: 33827
  source 1..80: mol_type = other DNA

SEQ ID NO: 67993 - DNA, 80 bp, synthetic construct; identical to SEQ ID NO: 12348
  source 1..80: mol_type = other DNA

SEQ ID NO: 67994 - DNA, 80 bp, synthetic construct; identical to SEQ ID NO: 33829
  source 1..80: mol_type = other DNA

SEQ ID NO: 67995 - DNA, 80 bp, synthetic construct; identical to SEQ ID NO: 33830
  source 1..80: mol_type = other DNA

SEQ ID NO: 67996 - DNA, 80 bp, synthetic construct; identical to SEQ ID NO: 33831
  source 1..80: mol_type = other DNA

SEQ ID NO: 67997 - DNA, 80 bp, synthetic construct; identical to SEQ ID NO: 12349
  source 1..80: mol_type = other DNA

SEQ ID NO: 67998 - DNA, 80 bp, synthetic construct; identical to SEQ ID NO: 33833
  source 1..80: mol_type = other DNA

SEQ ID NO: 67999 - DNA, 80 bp, synthetic construct; identical to SEQ ID NO: 33834
  source 1..80: mol_type = other DNA

SEQ ID NO: 68000 - DNA, 80 bp, synthetic construct; identical to SEQ ID NO: 33835
  source 1..80: mol_type = other DNA

SEQ ID NO: 68001 - DNA, 80 bp, synthetic construct; identical to SEQ ID NO: 33836
  source 1..80: mol_type = other DNA

SEQ ID NO: 68002 - DNA, 80 bp, synthetic construct; identical to SEQ ID NO: 12350
  source 1..80: mol_type = other DNA

SEQ ID NO: 68003 - DNA, 80 bp, synthetic construct; identical to SEQ ID NO: 33838
  source 1..80: mol_type = other DNA

SEQ ID NO: 68004 - DNA, 80 bp, synthetic construct; identical to SEQ ID NO: 33839
  source 1..80: mol_type = other DNA

SEQ ID NO: 68005 - DNA, 80 bp, synthetic construct; identical to SEQ ID NO: 33840
  source 1..80: mol_type = other DNA

SEQ ID NO: 68006 - DNA, 80 bp, synthetic construct; identical to SEQ ID NO: 12351
  source 1..80: mol_type = other DNA

SEQ ID NO: 68007 - DNA, 80 bp, synthetic construct; identical to SEQ ID NO: 33842
  source 1..80: mol_type = other DNA

SEQ ID NO: 68008 - DNA, 80 bp, synthetic construct; identical to SEQ ID NO: 33843
  source 1..80: mol_type = other DNA

SEQ ID NO: 68009 - DNA, 80 bp, synthetic construct; identical to SEQ ID NO: 12352
  source 1..80: mol_type = other DNA

SEQ ID NO: 68010 - DNA, 80 bp, synthetic construct; identical to SEQ ID NO: 33845
  source 1..80: mol_type = other DNA

SEQ ID NO: 68011 - DNA, 80 bp, synthetic construct; identical to SEQ ID NO: 33846
  source 1..80: mol_type = other DNA

SEQ ID NO: 68012 - DNA, 80 bp, synthetic construct; identical to SEQ ID NO: 33847
  source 1..80: mol_type = other DNA

SEQ ID NO: 68013 - DNA, 80 bp, synthetic construct; identical to SEQ ID NO: 12353
  source 1..80: mol_type = other DNA

SEQ ID NO: 68014 - DNA, 80 bp, synthetic construct; identical to SEQ ID NO: 33849
  source 1..80: mol_type = other DNA

SEQ ID NO: 68015 - DNA, 80 bp, synthetic construct; identical to SEQ ID NO: 33850
  source 1..80: mol_type = other DNA

SEQ ID NO: 68016 - DNA, 80 bp, synthetic construct; identical to SEQ ID NO: 33851
  source 1..80: mol_type = other DNA

SEQ ID NO: 68017 - DNA, 80 bp, synthetic construct; identical to SEQ ID NO: 12354
  source 1..80: mol_type = other DNA

SEQ ID NO: 68018 - DNA, 80 bp, synthetic construct; identical to SEQ ID NO: 33853
  source 1..80: mol_type = other DNA

SEQ ID NO: 68019 - DNA, 80 bp, synthetic construct; identical to SEQ ID NO: 33854
  source 1..80: mol_type = other DNA

SEQ ID NO: 68020 - DNA, 80 bp, synthetic construct; identical to SEQ ID NO: 33855
  source 1..80: mol_type = other DNA

SEQ ID NO: 68021 - DNA, 80 bp, synthetic construct; identical to SEQ ID NO: 12355
  source 1..80: mol_type = other DNA

SEQ ID NO: 68022 - DNA, 80 bp, synthetic construct; identical to SEQ ID NO: 33857
  source 1..80: mol_type = other DNA

SEQ ID NO: 68023 - DNA, 80 bp, synthetic construct; identical to SEQ ID NO: 33858
  source 1..80: mol_type = other DNA

SEQ ID NO: 68024 - DNA, 80 bp, synthetic construct; identical to SEQ ID NO: 33859
  source 1..80: mol_type = other DNA

SEQ ID NO: 68025 - DNA, 80 bp, synthetic construct; identical to SEQ ID NO: 33860
  source 1..80: mol_type = other DNA

SEQ ID NO: 68026 - DNA, 80 bp, synthetic construct; identical to SEQ ID NO: 12356
  source 1..80: mol_type = other DNA

SEQ ID NO: 68027 - DNA, 80 bp, synthetic construct; identical to SEQ ID NO: 33862
  source 1..80: mol_type = other DNA

SEQ ID NO: 68028 - DNA, 80 bp, synthetic construct; identical to SEQ ID NO: 33863
  source 1..80: mol_type = other DNA

SEQ ID NO: 68029 - DNA, 80 bp, synthetic construct; identical to SEQ ID NO: 12357
  source 1..80: mol_type = other DNA

SEQ ID NO: 68030 - DNA, 80 bp, synthetic construct; identical to SEQ ID NO: 33865
  source 1..80: mol_type = other DNA

SEQ ID NO: 68031 - DNA, 80 bp, synthetic construct; identical to SEQ ID NO: 33866
  source 1..80: mol_type = other DNA

SEQ ID NO: 68032 - DNA, 80 bp, synthetic construct; identical to SEQ ID NO: 33867
  source 1..80: mol_type = other DNA

SEQ ID NO: 68033 - DNA, 80 bp, synthetic construct; identical to SEQ ID NO: 33868
  source 1..80: mol_type = other DNA

SEQ ID NO: 68034 - DNA, 80 bp, synthetic construct; identical to SEQ ID NO: 12358
  source 1..80: mol_type = other DNA

SEQ ID NO: 68035 - DNA, 80 bp, synthetic construct; identical to SEQ ID NO: 33870
  source 1..80: mol_type = other DNA

SEQ ID NO: 68036 - DNA, 80 bp, synthetic construct; identical to SEQ ID NO: 33871
  source 1..80: mol_type = other DNA

SEQ ID NO: 68037 - DNA, 80 bp, synthetic construct; identical to SEQ ID NO: 12359
  source 1..80: mol_type = other DNA

SEQ ID NO: 68038 - DNA, 80 bp, synthetic construct; identical to SEQ ID NO: 33874
  source 1..80: mol_type = other DNA

SEQ ID NO: 68039 - DNA, 80 bp, synthetic construct; identical to SEQ ID NO: 12360
  source 1..80: mol_type = other DNA

SEQ ID NO: 68040 - DNA, 80 bp, synthetic construct; identical to SEQ ID NO: 33877
  source 1..80: mol_type = other DNA

SEQ ID NO: 68041 - DNA, 80 bp, synthetic construct; identical to SEQ ID NO: 33878
  source 1..80: mol_type = other DNA

SEQ ID NO: 68042 - DNA, 80 bp, synthetic construct; identical to SEQ ID NO: 33879
  source 1..80: mol_type = other DNA

SEQ ID NO: 68043 - DNA, 80 bp, synthetic construct; identical to SEQ ID NO: 12361
  source 1..80: mol_type = other DNA

SEQ ID NO: 68044 - DNA, 80 bp, synthetic construct; identical to SEQ ID NO: 33881
  source 1..80: mol_type = other DNA

SEQ ID NO: 68045 - DNA, 80 bp, synthetic construct; identical to SEQ ID NO: 33882
  source 1..80: mol_type = other DNA

SEQ ID NO: 68046 - DNA, 80 bp, synthetic construct; identical to SEQ ID NO: 33883
  source 1..80: mol_type = other DNA

SEQ ID NO: 68047 - DNA, 80 bp, synthetic construct; identical to SEQ ID NO: 12362
  source 1..80: mol_type = other DNA

SEQ ID NO: 68048 - DNA, 80 bp, synthetic construct; identical to SEQ ID NO: 33885
  source 1..80: mol_type = other DNA

SEQ ID NO: 68049 - DNA, 80 bp, synthetic construct; identical to SEQ ID NO: 33886
  source 1..80: mol_type = other DNA

SEQ ID NO: 68050 - DNA, 80 bp, synthetic construct; identical to SEQ ID NO: 33887
  source 1..80: mol_type = other DNA

SEQ ID NO: 68051 - DNA, 80 bp, synthetic construct; identical to SEQ ID NO: 33888
  source 1..80: mol_type = other DNA

SEQ ID NO: 68052 - DNA, 80 bp, synthetic construct; identical to SEQ ID NO: 12363
  source 1..80: mol_type = other DNA

SEQ ID NO: 68053 - DNA, 80 bp, synthetic construct; identical to SEQ ID NO: 33890
  source 1..80: mol_type = other DNA

SEQ ID NO: 68054 - DNA, 80 bp, synthetic construct; identical to SEQ ID NO: 33891
  source 1..80: mol_type = other DNA

SEQ ID NO: 68055 - DNA, 80 bp, synthetic construct; identical to SEQ ID NO: 12364
  source 1..80: mol_type = other DNA

SEQ ID NO: 68056 - DNA, 80 bp, synthetic construct; identical to SEQ ID NO: 33895
  source 1..80: mol_type = other DNA

SEQ ID NO: 68057 - DNA, 80 bp, synthetic construct; identical to SEQ ID NO: 12365
  source 1..80: mol_type = other DNA

SEQ ID NO: 68058 - DNA, 80 bp, synthetic construct; identical to SEQ ID NO: 33898
  source 1..80: mol_type = other DNA

SEQ ID NO: 68059 - DNA, 80 bp, synthetic construct; identical to SEQ ID NO: 12366
  source 1..80: mol_type = other DNA

SEQ ID NO: 68060 - DNA, 80 bp, synthetic construct; identical to SEQ ID NO: 33903
  source 1..80: mol_type = other DNA

SEQ ID NO: 68061 - DNA, 80 bp, synthetic construct; identical to SEQ ID NO: 12367
  source 1..80: mol_type = other DNA

SEQ ID NO: 68062 - DNA, 80 bp, synthetic construct; identical to SEQ ID NO: 33906
  source 1..80: mol_type = other DNA

SEQ ID NO: 68063 - DNA, 80 bp, synthetic construct; identical to SEQ ID NO: 33907
  source 1..80: mol_type = other DNA

SEQ ID NO: 68064 - DNA, 80 bp, synthetic construct; identical to SEQ ID NO: 12368
  source 1..80: mol_type = other DNA

SEQ ID NO: 68065 - DNA, 80 bp, synthetic construct; identical to SEQ ID NO: 33909
  source 1..80: mol_type = other DNA

SEQ ID NO: 68066 - DNA, 80 bp, synthetic construct; identical to SEQ ID NO: 33910
  source 1..80: mol_type = other DNA

SEQ ID NO: 68067 - DNA, 80 bp, synthetic construct; identical to SEQ ID NO: 33911
  source 1..80: mol_type = other DNA

SEQ ID NO: 68068 - DNA, 80 bp, synthetic construct; identical to SEQ ID NO: 33912
  source 1..80: mol_type = other DNA

SEQ ID NO: 68069 - DNA, 80 bp, synthetic construct; identical to SEQ ID NO: 12369
  source 1..80: mol_type = other DNA

SEQ ID NO: 68070 - DNA, 80 bp, synthetic construct; identical to SEQ ID NO: 33914
  source 1..80: mol_type = other DNA

SEQ ID NO: 68071 - DNA, 80 bp, synthetic construct; identical to SEQ ID NO: 33915
  source 1..80: mol_type = other DNA

SEQ ID NO: 68072 - DNA, 80 bp, synthetic construct; identical to SEQ ID NO: 33916
  source 1..80: mol_type = other DNA

SEQ ID NO: 68073 - DNA, 80 bp, synthetic construct; identical to SEQ ID NO: 12370
  source 1..80: mol_type = other DNA

SEQ ID NO: 68074 - DNA, 80 bp, synthetic construct; identical to SEQ ID NO: 33918
  source 1..80: mol_type = other DNA

SEQ ID NO: 68075 - DNA, 80 bp, synthetic construct; identical to SEQ ID NO: 33919
  source 1..80: mol_type = other DNA

SEQ ID NO: 68076 - DNA, 80 bp, synthetic construct; identical to SEQ ID NO: 33920
  source 1..80: mol_type = other DNA

SEQ ID NO: 68077 - DNA, 80 bp, synthetic construct; identical to SEQ ID NO: 12371
  source 1..80: mol_type = other DNA

SEQ ID NO: 68078 - DNA, 80 bp, synthetic construct; identical to SEQ ID NO: 33922
  source 1..80: mol_type = other DNA

SEQ ID NO: 68079 - DNA, 80 bp, synthetic construct; identical to SEQ ID NO: 33923
  source 1..80: mol_type = other DNA

SEQ ID NO: 68080 - DNA, 80 bp, synthetic construct; identical to SEQ ID NO: 12372
  source 1..80: mol_type = other DNA

SEQ ID NO: 68081 - DNA, 80 bp, synthetic construct; identical to SEQ ID NO: 33926
  source 1..80: mol_type = other DNA

SEQ ID NO: 68082 - DNA, 80 bp, synthetic construct; identical to SEQ ID NO: 12373
  source 1..80: mol_type = other DNA

SEQ ID NO: 68083 - DNA, 80 bp, synthetic construct; identical to SEQ ID NO: 33929
  source 1..80: mol_type = other DNA

SEQ ID NO: 68084 - DNA, 80 bp, synthetic construct; identical to SEQ ID NO: 33930
  source 1..80: mol_type = other DNA

SEQ ID NO: 68085 - DNA, 80 bp, synthetic construct; identical to SEQ ID NO: 33931
  source 1..80: mol_type = other DNA

SEQ ID NO: 68086 - DNA, 80 bp, synthetic construct; identical to SEQ ID NO: 33932
  source 1..80: mol_type = other DNA

SEQ ID NO: 68087 - DNA, 80 bp, synthetic construct; identical to SEQ ID NO: 12374
  source 1..80: mol_type = other DNA

SEQ ID NO: 68088 - DNA, 80 bp, synthetic construct; identical to SEQ ID NO: 33934
  source 1..80: mol_type = other DNA

SEQ ID NO: 68089 - DNA, 80 bp, synthetic construct; identical to SEQ ID NO: 33935
  source 1..80: mol_type = other DNA

SEQ ID NO: 68090 - DNA, 80 bp, synthetic construct; identical to SEQ ID NO: 12375
  source 1..80: mol_type = other DNA

SEQ ID NO: 68091 - DNA, 80 bp, synthetic construct; identical to SEQ ID NO: 33937
  source 1..80: mol_type = other DNA

SEQ ID NO: 68092 - DNA, 80 bp, synthetic construct; identical to SEQ ID NO: 33938
  source 1..80: mol_type = other DNA

SEQ ID NO: 68093 - DNA, 80 bp, synthetic construct; identical to SEQ ID NO: 33939
  source 1..80: mol_type = other DNA

SEQ ID NO: 68094 - DNA, 80 bp, synthetic construct; identical to SEQ ID NO: 33940
  source 1..80: mol_type = other DNA

SEQ ID NO: 68095 - DNA, 80 bp, synthetic construct; identical to SEQ ID NO: 12376
  source 1..80: mol_type = other DNA

SEQ ID NO: 68096 - DNA, 80 bp, synthetic construct; identical to SEQ ID NO: 33942
  source 1..80: mol_type = other DNA

SEQ ID NO: 68097 - DNA, 80 bp, synthetic construct; identical to SEQ ID NO: 33943
  source 1..80: mol_type = other DNA

SEQ ID NO: 68098 - DNA, 80 bp, synthetic construct; identical to SEQ ID NO: 33944
  source 1..80: mol_type = other DNA

SEQ ID NO: 68099 - DNA, 80 bp, synthetic construct; identical to SEQ ID NO: 12377
  source 1..80: mol_type = other DNA

SEQ ID NO: 68100 - DNA, 80 bp, synthetic construct; identical to SEQ ID NO: 33946
  source 1..80: mol_type = other DNA

SEQ ID NO: 68101 - DNA, 80 bp, synthetic construct; identical to SEQ ID NO: 33947
  source 1..80: mol_type = other DNA

SEQ ID NO: 68102 - DNA, 80 bp, synthetic construct; identical to SEQ ID NO: 33948
  source 1..80: mol_type = other DNA

SEQ ID NO: 68103 - DNA, 80 bp, synthetic construct; identical to SEQ ID NO: 33949
  source 1..80: mol_type = other DNA

SEQ ID NO: 68104 - DNA, 80 bp, synthetic construct; identical to SEQ ID NO: 12378
  source 1..80: mol_type = other DNA

SEQ ID NO: 68105 - DNA, 80 bp, synthetic construct; identical to SEQ ID NO: 33951
  source 1..80: mol_type = other DNA

SEQ ID NO: 68106 - DNA, 80 bp, synthetic construct; identical to SEQ ID NO: 33952
  source 1..80: mol_type = other DNA

SEQ ID NO: 68107 - DNA, 80 bp, synthetic construct; identical to SEQ ID NO: 33953
  source 1..80: mol_type = other DNA

SEQ ID NO: 68108 - DNA, 80 bp, synthetic construct; identical to SEQ ID NO: 12379
  source 1..80: mol_type = other DNA

SEQ ID NO: 68109 - DNA, 80 bp, synthetic construct; identical to SEQ ID NO: 33955
  source 1..80: mol_type = other DNA

SEQ ID NO: 68110 - DNA, 80 bp, synthetic construct; identical to SEQ ID NO: 33956
  source 1..80: mol_type = other DNA

SEQ ID NO: 68111 - DNA, 80 bp, synthetic construct; identical to SEQ ID NO: 12380
  source 1..80: mol_type = other DNA

SEQ ID NO: 68112 - DNA, 80 bp, synthetic construct; identical to SEQ ID NO: 33958
  source 1..80: mol_type = other DNA

SEQ ID NO: 68113 - DNA, 80 bp, synthetic construct; identical to SEQ ID NO: 33959
  source 1..80: mol_type = other DNA

SEQ ID NO: 68114 - DNA, 80 bp, synthetic construct; identical to SEQ ID NO: 33960
  source 1..80: mol_type = other DNA

SEQ ID NO: 68115 - DNA, 80 bp, synthetic construct; identical to SEQ ID NO: 33961
  source 1..80: mol_type = other DNA

SEQ ID NO: 68116 - DNA, 80 bp, synthetic construct; identical to SEQ ID NO: 12381
  source 1..80: mol_type = other DNA

SEQ ID NO: 68117 - DNA, 80 bp, synthetic construct; identical to SEQ ID NO: 33963
  source 1..80: mol_type = other DNA

SEQ ID NO: 68118 - DNA, 80 bp, synthetic construct; identical to SEQ ID NO: 33964
  source 1..80: mol_type = other DNA

SEQ ID NO: 68119 - DNA, 80 bp, synthetic construct; identical to SEQ ID NO: 33965
  source 1..80: mol_type = other DNA

SEQ ID NO: 68120 - DNA, 80 bp, synthetic construct; identical to SEQ ID NO: 12382
  source 1..80: mol_type = other DNA

SEQ ID NO: 68121 - DNA, 80 bp, synthetic construct; identical to SEQ ID NO: 33967
  source 1..80: mol_type = other DNA

SEQ ID NO: 68122 - DNA, 80 bp, synthetic construct; identical to SEQ ID NO: 33968
  source 1..80: mol_type = other DNA

SEQ ID NO: 68123 - DNA, 80 bp, synthetic construct; identical to SEQ ID NO: 33969
  source 1..80: mol_type = other DNA

SEQ ID NO: 68124 - DNA, 80 bp, synthetic construct; identical to SEQ ID NO: 12383
  source 1..80: mol_type = other DNA

SEQ ID NO: 68125 - DNA, 80 bp, synthetic construct; identical to SEQ ID NO: 33971
  source 1..80: mol_type = other DNA

SEQ ID NO: 68126 - DNA, 80 bp, synthetic construct; identical to SEQ ID NO: 33972
  source 1..80: mol_type = other DNA

SEQ ID NO: 68127 - DNA, 80 bp, synthetic construct; identical to SEQ ID NO: 12384
  source 1..80: mol_type = other DNA

SEQ ID NO: 68128 - DNA, 80 bp, synthetic construct; identical to SEQ ID NO: 33974
  source 1..80: mol_type = other DNA

SEQ ID NO: 68129 - DNA, 80 bp, synthetic construct; identical to SEQ ID NO: 33975
  source 1..80: mol_type = other DNA

SEQ ID NO: 68130 - DNA, 80 bp, synthetic construct; identical to SEQ ID NO: 33976
  source 1..80: mol_type = other DNA

SEQ ID NO: 68131 - DNA, 80 bp, synthetic construct; identical to SEQ ID NO: 12385
  source 1..80: mol_type = other DNA

SEQ ID NO: 68132 - DNA, 80 bp, synthetic construct; identical to SEQ ID NO: 33978
  source 1..80: mol_type = other DNA

SEQ ID NO: 68133 - DNA, 80 bp, synthetic construct; identical to SEQ ID NO: 33980
  source 1..80: mol_type = other DNA

SEQ ID NO: 68134 - DNA, 80 bp, synthetic construct; identical to SEQ ID NO: 33981
  source 1..80: mol_type = other DNA

SEQ ID NO: 68135 - DNA, 80 bp, synthetic construct; identical to SEQ ID NO: 12386
  source 1..80: mol_type = other DNA

SEQ ID NO: 68136 - DNA, 80 bp, synthetic construct; identical to SEQ ID NO: 33983
  source 1..80: mol_type = other DNA

SEQ ID NO: 68137 - DNA, 80 bp, synthetic construct; identical to SEQ ID NO: 33984
  source 1..80: mol_type = other DNA

SEQ ID NO: 68138 - DNA, 80 bp, synthetic construct; identical to SEQ ID NO: 33985
  source 1..80: mol_type = other DNA

SEQ ID NO: 68139 - DNA, 80 bp, synthetic construct; identical to SEQ ID NO: 12387
  source 1..80: mol_type = other DNA

SEQ ID NO: 68140 - DNA, 80 bp, synthetic construct; identical to SEQ ID NO: 33987
  source 1..80: mol_type = other DNA

SEQ ID NO: 68141 - DNA, 80 bp, synthetic construct; identical to SEQ ID NO: 33988
  source 1..80: mol_type = other DNA

SEQ ID NO: 68142 - DNA, 80 bp, synthetic construct; identical to SEQ ID NO: 12388
  source 1..80: mol_type = other DNA

SEQ ID NO: 68143 - DNA, 80 bp, synthetic construct; identical to SEQ ID NO: 33990
  source 1..80: mol_type = other DNA

SEQ ID NO: 68144 - DNA, 80 bp, synthetic construct; identical to SEQ ID NO: 33991
  source 1..80: mol_type = other DNA

SEQ ID NO: 68145 - DNA, 80 bp, synthetic construct; identical to SEQ ID NO: 33992
  source 1..80: mol_type = other DNA

SEQ ID NO: 68146 - DNA, 80 bp, synthetic construct; identical to SEQ ID NO: 33993
  source 1..80: mol_type = other DNA

SEQ ID NO: 68147 - DNA, 80 bp, synthetic construct; identical to SEQ ID NO: 12389
  source 1..80: mol_type = other DNA

SEQ ID NO: 68148 - DNA, 80 bp, synthetic construct; identical to SEQ ID NO: 33995
  source 1..80: mol_type = other DNA

SEQ ID NO: 68149 - DNA, 80 bp, synthetic construct; identical to SEQ ID NO: 33996
  source 1..80: mol_type = other DNA

SEQ ID NO: 68150 - DNA, 80 bp, synthetic construct; identical to SEQ ID NO: 33997
  source 1..80: mol_type = other DNA

SEQ ID NO: 68151 - DNA, 80 bp, synthetic construct; identical to SEQ ID NO: 12390
  source 1..80: mol_type = other DNA

SEQ ID NO: 68152 - DNA, 80 bp, synthetic construct; identical to SEQ ID NO: 33999
  source 1..80: mol_type = other DNA

SEQ ID NO: 68153 - DNA, 80 bp, synthetic construct; identical to SEQ ID NO: 34000
  source 1..80: mol_type = other DNA

SEQ ID NO: 68154 - DNA, 80 bp, synthetic construct; identical to SEQ ID NO: 34001
  source 1..80: mol_type = other DNA

SEQ ID NO: 68155 - DNA, 80 bp, synthetic construct; identical to SEQ ID NO: 12391
  source 1..80: mol_type = other DNA

SEQ ID NO: 68156 - DNA, 80 bp, synthetic construct; identical to SEQ ID NO: 34003
  source 1..80: mol_type = other DNA

SEQ ID NO: 68157 - DNA, 80 bp, synthetic construct; identical to SEQ ID NO: 34004
  source 1..80: mol_type = other DNA

SEQ ID NO: 68158 - DNA, 80 bp, synthetic construct; identical to SEQ ID NO: 34005
  source 1..80: mol_type = other DNA

SEQ ID NO: 68159 - DNA, 80 bp, synthetic construct; identical to SEQ ID NO: 12392
  source 1..80: mol_type = other DNA

SEQ ID NO: 68160 - DNA, 80 bp, synthetic construct; identical to SEQ ID NO: 34007
  source 1..80: mol_type = other DNA

SEQ ID NO: 68161 - DNA, 80 bp, synthetic construct; identical to SEQ ID NO: 34008
  source 1..80: mol_type = other DNA

SEQ ID NO: 68162 - DNA, 80 bp, synthetic construct; identical to SEQ ID NO: 12393
  source 1..80: mol_type = other DNA

SEQ ID NO: 68163 - DNA, 80 bp, synthetic construct; identical to SEQ ID NO: 34010
  source 1..80: mol_type = other DNA

SEQ ID NO: 68164 - DNA, 80 bp, synthetic construct; identical to SEQ ID NO: 34011
  source 1..80: mol_type = other DNA

SEQ ID NO: 68165 - DNA, 80 bp, synthetic construct; identical to SEQ ID NO: 34012
  source 1..80: mol_type = other DNA

SEQ ID NO: 68166 - DNA, 80 bp, synthetic construct; identical to SEQ ID NO: 34013
  source 1..80: mol_type = other DNA

SEQ ID NO: 68167 - DNA, 80 bp, synthetic construct; identical to SEQ ID NO: 12394
  source 1..80: mol_type = other DNA

SEQ ID NO: 68168 - DNA, 80 bp, synthetic construct; identical to SEQ ID NO: 34015
  source 1..80: mol_type = other DNA

SEQ ID NO: 68169 - DNA, 80 bp, synthetic construct; identical to SEQ ID NO: 34016
  source 1..80: mol_type = other DNA

SEQ ID NO: 68170 - DNA, 80 bp, synthetic construct; identical to SEQ ID NO: 12395
  source 1..80: mol_type = other DNA

SEQ ID NO: 68171 - DNA, 80 bp, synthetic construct; identical to SEQ ID NO: 34018
  source 1..80: mol_type = other DNA

SEQ ID NO: 68172 - DNA, 80 bp, synthetic construct; identical to SEQ ID NO: 34019
  source 1..80: mol_type = other DNA

SEQ ID NO: 68173 - DNA, 80 bp, synthetic construct; identical to SEQ ID NO: 34020
  source 1..80: mol_type = other DNA

SEQ ID NO: 68174 - DNA, 80 bp, synthetic construct; identical to SEQ ID NO: 34021
  source 1..80: mol_type = other DNA

SEQ ID NO: 68175 - DNA, 80 bp, synthetic construct; identical to SEQ ID NO: 12396
  source 1..80: mol_type = other DNA

SEQ ID NO: 68176 - DNA, 80 bp, synthetic construct; identical to SEQ ID NO: 34023
  source 1..80: mol_type = other DNA

SEQ ID NO: 68177 - DNA, 80 bp, synthetic construct; identical to SEQ ID NO: 34024
  source 1..80: mol_type = other DNA

SEQ ID NO: 68178 - DNA, 80 bp, synthetic construct; identical to SEQ ID NO: 12397
  source 1..80: mol_type = other DNA

SEQ ID NO: 68179 - DNA, 80 bp, synthetic construct; identical to SEQ ID NO: 34026
  source 1..80: mol_type = other DNA

SEQ ID NO: 68180 - DNA, 80 bp, synthetic construct; identical to SEQ ID NO: 34027
  source 1..80: mol_type = other DNA

SEQ ID NO: 68181 - DNA, 80 bp, synthetic construct; identical to SEQ ID NO: 34028
  source 1..80: mol_type = other DNA

SEQ ID NO: 68182 - DNA, 80 bp, synthetic construct; identical to SEQ ID NO: 12398
  source 1..80: mol_type = other DNA

SEQ ID NO: 68183 - DNA, 80 bp, synthetic construct; identical to SEQ ID NO: 34030
  source 1..80: mol_type = other DNA

SEQ ID NO: 68184 - DNA, 80 bp, synthetic construct; identical to SEQ ID NO: 34031
  source 1..80: mol_type = other DNA

SEQ ID NO: 68185 - DNA, 80 bp, synthetic construct; identical to SEQ ID NO: 34032
  source 1..80: mol_type = other DNA

SEQ ID NO: 68186 - DNA, 80 bp, synthetic construct; identical to SEQ ID NO: 34033
  source 1..80: mol_type = other DNA

SEQ ID NO: 68187 - DNA, 80 bp, synthetic construct; identical to SEQ ID NO: 12399
  source 1..80: mol_type = other DNA

SEQ ID NO: 68188 - DNA, 80 bp, synthetic construct; identical to SEQ ID NO: 34035
  source 1..80: mol_type = other DNA

SEQ ID NO: 68189 - DNA, 80 bp, synthetic construct; identical to SEQ ID NO: 34036
  source 1..80: mol_type = other DNA

SEQ ID NO: 68190 - DNA, 80 bp, synthetic construct; identical to SEQ ID NO: 12400
  source 1..80: mol_type = other DNA

SEQ ID NO: 68191 - DNA, 80 bp, synthetic construct; identical to SEQ ID NO: 34038
  source 1..80: mol_type = other DNA

SEQ ID NO: 68192 - DNA, 80 bp, synthetic construct; identical to SEQ ID NO: 34039
  source 1..80: mol_type = other DNA

SEQ ID NO: 68193 - DNA, 80 bp, synthetic construct; identical to SEQ ID NO: 34040
  source 1..80: mol_type = other DNA

SEQ ID NO: 68194 - DNA, 80 bp, synthetic construct; identical to SEQ ID NO: 12401
  source 1..80: mol_type = other DNA

SEQ ID NO: 68195 - DNA, 80 bp, synthetic construct; identical to SEQ ID NO: 34042
  source 1..80: mol_type = other DNA

SEQ ID NO: 68196 - DNA, 80 bp, synthetic construct; identical to SEQ ID NO: 34043
  source 1..80: mol_type = other DNA

SEQ ID NO: 68197 - DNA, 80 bp, synthetic construct; identical to SEQ ID NO: 34044
  source 1..80: mol_type = other DNA

SEQ ID NO: 68198 - DNA, 80 bp, synthetic construct; identical to SEQ ID NO: 34045
  source 1..80: mol_type = other DNA

SEQ ID NO: 68199 - DNA, 80 bp, synthetic construct; identical to SEQ ID NO: 12402
  source 1..80: mol_type = other DNA

SEQ ID NO: 68200 - DNA, 80 bp, synthetic construct; identical to SEQ ID NO: 34047
  source 1..80: mol_type = other DNA

SEQ ID NO: 68201 - DNA, 80 bp, synthetic construct; identical to SEQ ID NO: 34048
  source 1..80: mol_type = other DNA

SEQ ID NO: 68202 - DNA, 80 bp, synthetic construct; identical to SEQ ID NO: 12403
  source 1..80: mol_type = other DNA

SEQ ID NO: 68203 - DNA, 80 bp, synthetic construct; identical to SEQ ID NO: 34050
  source 1..80: mol_type = other DNA

SEQ ID NO: 68204 - DNA, 80 bp, synthetic construct; identical to SEQ ID NO: 34051
  source 1..80: mol_type = other DNA

SEQ ID NO: 68205 - DNA, 80 bp, synthetic construct; identical to SEQ ID NO: 34052
  source 1..80: mol_type = other DNA

SEQ ID NO: 68206 - DNA, 80 bp, synthetic construct; identical to SEQ ID NO: 12404
  source 1..80: mol_type = other DNA

SEQ ID NO: 68207 - DNA, 80 bp, synthetic construct; identical to SEQ ID NO: 34054
  source 1..80: mol_type = other DNA

SEQ ID NO: 68208 - DNA, 80 bp, synthetic construct; identical to SEQ ID NO: 34055
  source 1..80: mol_type = other DNA

SEQ ID NO: 68209 - DNA, 80 bp, synthetic construct; identical to SEQ ID NO: 34056
  source 1..80: mol_type = other DNA

SEQ ID NO: 68210 - DNA, 80 bp, synthetic construct; identical to SEQ ID NO: 12405
  source 1..80: mol_type = other DNA

SEQ ID NO: 68211 - DNA, 80 bp, synthetic construct; identical to SEQ ID NO: 34058
  source 1..80: mol_type = other DNA

SEQ ID NO: 68212 - DNA, 80 bp, synthetic construct; identical to SEQ ID NO: 34059
  source 1..80: mol_type = other DNA

SEQ ID NO: 68213 - DNA, 80 bp, synthetic construct; identical to SEQ ID NO: 34060
  source 1..80: mol_type = other DNA

SEQ ID NO: 68214 - DNA, 80 bp, synthetic construct; identical to SEQ ID NO: 34061
  source 1..80: mol_type = other DNA

SEQ ID NO: 68215 - DNA, 80 bp, synthetic construct; identical to SEQ ID NO: 12406
  source 1..80: mol_type = other DNA

SEQ ID NO: 68216 - DNA, 80 bp, synthetic construct; identical to SEQ ID NO: 34063
  source 1..80: mol_type = other DNA

SEQ ID NO: 68217 - DNA, 80 bp, synthetic construct; identical to SEQ ID NO: 34064
  source 1..80: mol_type = other DNA

SEQ ID NO: 68218 - DNA, 80 bp, synthetic construct; identical to SEQ ID NO: 12407
  source 1..80: mol_type = other DNA

SEQ ID NO: 68219 - DNA, 80 bp, synthetic construct; identical to SEQ ID NO: 34066
  source 1..80: mol_type = other DNA

SEQ ID NO: 68220 - DNA, 80 bp, synthetic construct; identical to SEQ ID NO: 34067
  source 1..80: mol_type = other DNA

SEQ ID NO: 68221 - DNA, 80 bp, synthetic construct; identical to SEQ ID NO: 34068
  source 1..80: mol_type = other DNA

SEQ ID NO: 68222 - DNA, 80 bp, synthetic construct; identical to SEQ ID NO: 34069
  source 1..80: mol_type = other DNA

SEQ ID NO: 68223 - DNA, 80 bp, synthetic construct; identical to SEQ ID NO: 12408
  source 1..80: mol_type = other DNA

SEQ ID NO: 68224 - DNA, 80 bp, synthetic construct; identical to SEQ ID NO: 34071
  source 1..80: mol_type = other DNA

SEQ ID NO: 68225 - DNA, 80 bp, synthetic construct; identical to SEQ ID NO: 34072
  source 1..80: mol_type = other DNA

SEQ ID NO: 68226 - DNA, 80 bp, synthetic construct; identical to SEQ ID NO: 12409
  source 1..80: mol_type = other DNA

SEQ ID NO: 68227 - DNA, 80 bp, synthetic construct; identical to SEQ ID NO: 34074
  source 1..80: mol_type = other DNA

SEQ ID NO: 68228 - DNA, 80 bp, synthetic construct; identical to SEQ ID NO: 34075
  source 1..80: mol_type = other DNA

SEQ ID NO: 68229 - DNA, 80 bp, synthetic construct; identical to SEQ ID NO: 34076
  source 1..80: mol_type = other DNA

SEQ ID NO: 68230 - DNA, 80 bp, synthetic construct; identical to SEQ ID NO: 12410
  source 1..80: mol_type = other DNA

SEQ ID NO: 68231 - DNA, 80 bp, synthetic construct; identical to SEQ ID NO: 34079
  source 1..80: mol_type = other DNA

SEQ ID NO: 68232 - DNA, 80 bp, synthetic construct; identical to SEQ ID NO: 34080
  source 1..80: mol_type = other DNA

SEQ ID NO: 68233 - DNA, 80 bp, synthetic construct; identical to SEQ ID NO: 12411
  source 1..80: mol_type = other DNA

SEQ ID NO: 68234 - DNA, 80 bp, synthetic construct; identical to SEQ ID NO: 34082
  source 1..80: mol_type = other DNA

SEQ ID NO: 68235 - DNA, 80 bp, synthetic construct; identical to SEQ ID NO: 34083
  source 1..80: mol_type = other DNA

SEQ ID NO: 68236 - DNA, 80 bp, synthetic construct; identical to SEQ ID NO: 34084
  source 1..80: mol_type = other DNA

SEQ ID NO: 68237 - DNA, 80 bp, synthetic construct; identical to SEQ ID NO: 34085
  source 1..80: mol_type = other DNA

SEQ ID NO: 68238 - DNA, 80 bp, synthetic construct; identical to SEQ ID NO: 12412
  source 1..80: mol_type = other DNA

SEQ ID NO: 68239 - DNA, 80 bp, synthetic construct; identical to SEQ ID NO: 34087
  source 1..80: mol_type = other DNA

SEQ ID NO: 68240 - DNA, 80 bp, synthetic construct; identical to SEQ ID NO: 34088
  source 1..80: mol_type = other DNA

SEQ ID NO: 68241 - DNA, 80 bp, synthetic construct; identical to SEQ ID NO: 34089
  source 1..80: mol_type = other DNA

SEQ ID NO: 68242 - DNA, 80 bp, synthetic construct; identical to SEQ ID NO: 12413
  source 1..80: mol_type = other DNA

SEQ ID NO: 68243 - DNA, 80 bp, synthetic construct; identical to SEQ ID NO: 34091
  source 1..80: mol_type = other DNA

SEQ ID NO: 68244 - DNA, 80 bp, synthetic construct; identical to SEQ ID NO: 34092
  source 1..80: mol_type = other DNA

SEQ ID NO: 68245 - DNA, 80 bp, synthetic construct; identical to SEQ ID NO: 34093
  source 1..80: mol_type = other DNA

SEQ ID NO: 68246 - DNA, 80 bp, synthetic construct; identical to SEQ ID NO: 12414
  source 1..80: mol_type = other DNA

SEQ ID NO: 68247 - DNA, 80 bp, synthetic construct; identical to SEQ ID NO: 34095
  source 1..80: mol_type = other DNA

SEQ ID NO: 68248 - DNA, 80 bp, synthetic construct; identical to SEQ ID NO: 34096
  source 1..80: mol_type = other DNA

SEQ ID NO: 68249 - DNA, 80 bp, synthetic construct; identical to SEQ ID NO: 12415
  source 1..80: mol_type = other DNA

SEQ ID NO: 68250 - DNA, 80 bp, synthetic construct; identical to SEQ ID NO: 34098
  source 1..80: mol_type = other DNA

SEQ ID NO: 68251 - DNA, 80 bp, synthetic construct; identical to SEQ ID NO: 34099
  source 1..80: mol_type = other DNA

SEQ ID NO: 68252 - DNA, 80 bp, synthetic construct; identical to SEQ ID NO: 34100
  source 1..80: mol_type = other DNA

SEQ ID NO: 68253 - DNA, 80 bp, synthetic construct; identical to SEQ ID NO: 12416
  source 1..80: mol_type = other DNA

SEQ ID NO: 68254 - DNA, 80 bp, synthetic construct; identical to SEQ ID NO: 34103
  source 1..80: mol_type = other DNA

SEQ ID NO: 68255 - DNA, 80 bp, synthetic construct; identical to SEQ ID NO: 34104
  source 1..80: mol_type = other DNA

SEQ ID NO: 68256 - DNA, 80 bp, synthetic construct; identical to SEQ ID NO: 12417
  source 1..80: mol_type = other DNA

SEQ ID NO: 68257 - DNA, 80 bp, synthetic construct; identical to SEQ ID NO: 34106
  source 1..80: mol_type = other DNA

SEQ ID NO: 68258 - DNA, 80 bp, synthetic construct; identical to SEQ ID NO: 34107
  source 1..80: mol_type = other DNA

SEQ ID NO: 68259 - DNA, 80 bp, synthetic construct; identical to SEQ ID NO: 34108
  source 1..80: mol_type = other DNA

SEQ ID NO: 68260 - DNA, 80 bp, synthetic construct; identical to SEQ ID NO: 34109
  source 1..80: mol_type = other DNA

SEQ ID NO: 68261 - DNA, 80 bp, synthetic construct; identical to SEQ ID NO: 12418
  source 1..80: mol_type = other DNA

SEQ ID NO: 68262 - DNA, 80 bp, synthetic construct; identical to SEQ ID NO: 34111
  source 1..80: mol_type = other DNA

SEQ ID NO: 68263 - DNA, 80 bp, synthetic construct; identical to SEQ ID NO: 34112
  source 1..80: mol_type = other DNA

SEQ ID NO: 68264 - DNA, 80 bp, synthetic construct; identical to SEQ ID NO: 12419
  source 1..80: mol_type = other DNA

SEQ ID NO: 68265 - DNA, 80 bp, synthetic construct; identical to SEQ ID NO: 34114
  source 1..80: mol_type = other DNA

SEQ ID NO: 68266 - DNA, 80 bp, synthetic construct; identical to SEQ ID NO: 34115
  source 1..80: mol_type = other DNA

SEQ ID NO: 68267 - DNA, 80 bp, synthetic construct; identical to SEQ ID NO: 34116
  source 1..80: mol_type = other DNA

SEQ ID NO: 68268 - DNA, 80 bp, synthetic construct; identical to SEQ ID NO: 34117
  source 1..80: mol_type = other DNA

SEQ ID NO: 68269 - DNA, 80 bp, synthetic construct; identical to SEQ ID NO: 12420
  source 1..80: mol_type = other DNA

SEQ ID NO: 68270 - DNA, 80 bp, synthetic construct; identical to SEQ ID NO: 34119
  source 1..80: mol_type = other DNA

SEQ ID NO: 68271 - DNA, 80 bp, synthetic construct; identical to SEQ ID NO: 34120
  source 1..80: mol_type = other DNA

SEQ ID NO: 68272 - DNA, 80 bp, synthetic construct; identical to SEQ ID NO: 12421
  source 1..80: mol_type = other DNA

SEQ ID NO: 68273 - DNA, 80 bp, synthetic construct; identical to SEQ ID NO: 34122
  source 1..80: mol_type = other DNA

SEQ ID NO: 68274 - DNA, 80 bp, synthetic construct; identical to SEQ ID NO: 34123
  source 1..80: mol_type = other DNA

SEQ ID NO: 68275 - DNA, 80 bp, synthetic construct; identical to SEQ ID NO: 34124
  source 1..80: mol_type = other DNA

SEQ ID NO: 68276 - DNA, 80 bp, synthetic construct; identical to SEQ ID NO: 12422
  source 1..80: mol_type = other DNA

SEQ ID NO: 68277 - DNA, 80 bp, synthetic construct; identical to SEQ ID NO: 34126
  source 1..80: mol_type = other DNA

SEQ ID NO: 68278 - DNA, 80 bp, synthetic construct; identical to SEQ ID NO: 34127
  source 1..80: mol_type = other DNA

SEQ ID NO: 68279 - DNA, 80 bp, synthetic construct; identical to SEQ ID NO: 34128
  source 1..80: mol_type = other DNA

SEQ ID NO: 68280 - DNA, 80 bp, synthetic construct; identical to SEQ ID NO: 12423
  source 1..80: mol_type = other DNA

SEQ ID NO: 68281 - DNA, 80 bp, synthetic construct; identical to SEQ ID NO: 34130
  source 1..80: mol_type = other DNA

SEQ ID NO: 68282 - DNA, 80 bp, synthetic construct; identical to SEQ ID NO: 34131
  source 1..80: mol_type = other DNA

SEQ ID NO: 68283 - DNA, 80 bp, synthetic construct; identical to SEQ ID NO: 34132
  source 1..80: mol_type = other DNA

SEQ ID NO: 68284 - DNA, 80 bp, synthetic construct; identical to SEQ ID NO: 34133
  source 1..80: mol_type = other DNA

SEQ ID NO: 68285 - DNA, 80 bp, synthetic construct; identical to SEQ ID NO: 12424
  source 1..80: mol_type = other DNA

SEQ ID NO: 68286 - DNA, 80 bp, synthetic construct; identical to SEQ ID NO: 34135
  source 1..80: mol_type = other DNA

SEQ ID NO: 68287 - DNA, 80 bp, synthetic construct; identical to SEQ ID NO: 34136
  source 1..80: mol_type = other DNA

SEQ ID NO: 68288 - DNA, 80 bp, synthetic construct; identical to SEQ ID NO: 34137
  source 1..80: mol_type = other DNA

SEQ ID NO: 68289 - DNA, 80 bp, synthetic construct; identical to SEQ ID NO: 12425
  source 1..80: mol_type = other DNA

SEQ ID NO: 68290 - DNA, 80 bp, synthetic construct; identical to SEQ ID NO: 34139
  source 1..80: mol_type = other DNA

SEQ ID NO: 68291 - DNA, 80 bp, synthetic construct; identical to SEQ ID NO: 34140
  source 1..80: mol_type = other DNA

SEQ ID NO: 68292 - DNA, 80 bp, synthetic construct; identical to SEQ ID NO: 34141
  source 1..80: mol_type = other DNA

SEQ ID NO: 68293 - DNA, 80 bp, synthetic construct; identical to SEQ ID NO: 12426
  source 1..80: mol_type = other DNA

SEQ ID NO: 68294 - DNA, 80 bp, synthetic construct; identical to SEQ ID NO: 34143
  source 1..80: mol_type = other DNA

SEQ ID NO: 68295 - DNA, 80 bp, synthetic construct; identical to SEQ ID NO: 34144
  source 1..80: mol_type = other DNA

SEQ ID NO: 68296 - DNA, 80 bp, synthetic construct; identical to SEQ ID NO: 34145
  source 1..80: mol_type = other DNA

SEQ ID NO: 68297 - DNA, 80 bp, synthetic construct; identical to SEQ ID NO: 12427
  source 1..80: mol_type = other DNA

SEQ ID NO: 68298 - DNA, 80 bp, synthetic construct; identical to SEQ ID NO: 34147
  source 1..80: mol_type = other DNA

SEQ ID NO: 68299 - DNA, 80 bp, synthetic construct; identical to SEQ ID NO: 34148
  source 1..80: mol_type = other DNA

SEQ ID NO: 68300 - DNA, 80 bp, synthetic construct; identical to SEQ ID NO: 12428
  source 1..80: mol_type = other DNA

SEQ ID NO: 68301 - DNA, 80 bp, synthetic construct; identical to SEQ ID NO: 34150
  source 1..80: mol_type = other DNA

SEQ ID NO: 68302 - DNA, 80 bp, synthetic construct; identical to SEQ ID NO: 34151
  source 1..80: mol_type = other DNA

SEQ ID NO: 68303 - DNA, 80 bp, synthetic construct; identical to SEQ ID NO: 34152
  source 1..80: mol_type = other DNA

SEQ ID NO: 68304 - DNA, 80 bp, synthetic construct; identical to SEQ ID NO: 12429
  source 1..80: mol_type = other DNA

SEQ ID NO: 68305 - DNA, 80 bp, synthetic construct; identical to SEQ ID NO: 34154
  source 1..80: mol_type = other DNA

SEQ ID NO: 68306 - DNA, 80 bp, synthetic construct; identical to SEQ ID NO: 34155
  source 1..80: mol_type = other DNA

SEQ ID NO: 68307 - DNA, 80 bp, synthetic construct; identical to SEQ ID NO: 34156
  source 1..80: mol_type = other DNA

SEQ ID NO: 68308 - DNA, 80 bp, synthetic construct; identical to SEQ ID NO: 34157
  source 1..80: mol_type = other DNA

SEQ ID NO: 68309 - DNA, 80 bp, synthetic construct; identical to SEQ ID NO: 12430
  source 1..80: mol_type = other DNA

SEQ ID NO: 68310 - DNA, 80 bp, synthetic construct; identical to SEQ ID NO: 34159
  source 1..80: mol_type = other DNA

SEQ ID NO: 68311 - DNA, 80 bp, synthetic construct; identical to SEQ ID NO: 34160
  source 1..80: mol_type = other DNA

SEQ ID NO: 68312 - DNA, 80 bp, synthetic construct; identical to SEQ ID NO: 12431
  source 1..80: mol_type = other DNA

SEQ ID NO: 68313 - DNA, 80 bp, synthetic construct; identical to SEQ ID NO: 34162
  source 1..80: mol_type = other DNA

SEQ ID NO: 68314 - DNA, 80 bp, synthetic construct; identical to SEQ ID NO: 34163
  source 1..80: mol_type = other DNA

SEQ ID NO: 68315 - DNA, 80 bp, synthetic construct; identical to SEQ ID NO: 34164
  source 1..80: mol_type = other DNA

SEQ ID NO: 68316 - DNA, 80 bp, synthetic construct; identical to SEQ ID NO: 34165
  source 1..80: mol_type = other DNA

SEQ ID NO: 68317 - DNA, 80 bp, synthetic construct; identical to SEQ ID NO: 12432
  source 1..80: mol_type = other DNA

SEQ ID NO: 68318 - DNA, 80 bp, synthetic construct; identical to SEQ ID NO: 34167
  source 1..80: mol_type = other DNA

SEQ ID NO: 68319 - DNA, 80 bp, synthetic construct; identical to SEQ ID NO: 12433
  source 1..80: mol_type = other DNA

SEQ ID NO: 68320 - DNA, 80 bp, synthetic construct; identical to SEQ ID NO: 34170
  source 1..80: mol_type = other DNA

SEQ ID NO: 68321 - DNA, 80 bp, synthetic construct; identical to SEQ ID NO: 34171
  source 1..80: mol_type = other DNA

SEQ ID NO: 68322 - DNA, 80 bp, synthetic construct; identical to SEQ ID NO: 34172
  source 1..80: mol_type = other DNA

SEQ ID NO: 68323 - DNA, 80 bp, synthetic construct; identical to SEQ ID NO: 12434
  source 1..80: mol_type = other DNA

SEQ ID NO: 68324 - DNA, 80 bp, synthetic construct; identical to SEQ ID NO: 34174
  source 1..80: mol_type = other DNA

SEQ ID NO: 68325 - DNA, 80 bp, synthetic construct; identical to SEQ ID NO: 34175
  source 1..80: mol_type = other DNA

SEQ ID NO: 68326 - DNA, 80 bp, synthetic construct; identical to SEQ ID NO: 34176
  source 1..80: mol_type = other DNA

SEQ ID NO: 68327 - DNA, 80 bp, synthetic construct; identical to SEQ ID NO: 34177
  source 1..80: mol_type = other DNA

SEQ ID NO: 68328 - DNA, 80 bp, synthetic construct; identical to SEQ ID NO: 12435
  source 1..80: mol_type = other DNA

SEQ ID NO: 68329 - DNA, 80 bp, synthetic construct; identical to SEQ ID NO: 34179
  source 1..80: mol_type = other DNA

SEQ ID NO: 68330 - DNA, 80 bp, synthetic construct; identical to SEQ ID NO: 34180
  source 1..80: mol_type = other DNA

SEQ ID NO: 68331 - DNA, 80 bp, synthetic construct; identical to SEQ ID NO: 12436
  source 1..80: mol_type = other DNA

SEQ ID NO: 68332 - DNA, 80 bp, synthetic construct; identical to SEQ ID NO: 34183
  source 1..80: mol_type = other DNA

SEQ ID NO: 68333 - DNA, 80 bp, synthetic construct; identical to SEQ ID NO: 34184
  source 1..80: mol_type = other DNA

SEQ ID NO: 68334 - DNA, 80 bp, synthetic construct; identical to SEQ ID NO: 34185
  source 1..80: mol_type = other DNA

SEQ ID NO: 68335 - DNA, 80 bp, synthetic construct; identical to SEQ ID NO: 12437
  source 1..80: mol_type = other DNA

SEQ ID NO: 68336 - DNA, 80 bp, synthetic construct; identical to SEQ ID NO: 34188
  source 1..80: mol_type = other DNA

SEQ ID NO: 68337 - DNA, 80 bp, synthetic construct; identical to SEQ ID NO: 12438
  source 1..80: mol_type = other DNA

SEQ ID NO: 68338 - DNA, 80 bp, synthetic construct; identical to SEQ ID NO: 34190
  source 1..80: mol_type = other DNA

SEQ ID NO: 68339 - DNA, 80 bp, synthetic construct; identical to SEQ ID NO: 34191
  source 1..80: mol_type = other DNA

SEQ ID NO: 68340 - DNA, 80 bp, synthetic construct; identical to SEQ ID NO: 34192
  source 1..80: mol_type = other DNA

SEQ ID NO: 68341 - DNA, 80 bp, synthetic construct; identical to SEQ ID NO: 34193
  source 1..80: mol_type = other DNA

SEQ ID NO: 68342 - DNA, 80 bp, synthetic construct; identical to SEQ ID NO: 12439
  source 1..80: mol_type = other DNA

SEQ ID NO: 68343 - DNA, 80 bp, synthetic construct; identical to SEQ ID NO: 34195
  source 1..80: mol_type = other DNA

SEQ ID NO: 68344 - DNA, 80 bp, synthetic construct; identical to SEQ ID NO: 34196
  source 1..80: mol_type = other DNA

SEQ ID NO: 68345 - DNA, 80 bp, synthetic construct; identical to SEQ ID NO: 34197
  source 1..80: mol_type = other DNA

SEQ ID NO: 68346 - DNA, 80 bp, synthetic construct; identical to SEQ ID NO: 12440
  source 1..80: mol_type = other DNA

SEQ ID NO: 68347 - DNA, 80 bp, synthetic construct; identical to SEQ ID NO: 34199
  source 1..80: mol_type = other DNA

SEQ ID NO: 68348 - DNA, 80 bp, synthetic construct; identical to SEQ ID NO: 34200
  source 1..80: mol_type = other DNA

SEQ ID NO: 68349 - DNA, 80 bp, synthetic construct; identical to SEQ ID NO: 34201
  source 1..80: mol_type = other DNA

SEQ ID NO: 68350 - DNA, 80 bp, synthetic construct; identical to SEQ ID NO: 12441
  source 1..80: mol_type = other DNA

SEQ ID NO: 68351 - DNA, 80 bp, synthetic construct; identical to SEQ ID NO: 34203
  source 1..80: mol_type = other DNA

SEQ ID NO: 68352 - DNA, 80 bp, synthetic construct; identical to SEQ ID NO: 34204
  source 1..80: mol_type = other DNA

SEQ ID NO: 68353 - DNA, 80 bp, synthetic construct; identical to SEQ ID NO: 12442
  source 1..80: mol_type = other DNA

SEQ ID NO: 68354 - DNA, 80 bp, synthetic construct; identical to SEQ ID NO: 34206
  source 1..80: mol_type = other DNA

SEQ ID NO: 68355 - DNA, 80 bp, synthetic construct; identical to SEQ ID NO: 34207
  source 1..80: mol_type = other DNA

SEQ ID NO: 68356 - DNA, 80 bp, synthetic construct; identical to SEQ ID NO: 34208
  source 1..80: mol_type = other DNA

SEQ ID NO: 68357 - DNA, 80 bp, synthetic construct; identical to SEQ ID NO: 12443
  source 1..80: mol_type = other DNA

SEQ ID NO: 68358 - DNA, 80 bp, synthetic construct; identical to SEQ ID NO: 34211
  source 1..80: mol_type = other DNA

SEQ ID NO: 68359 - DNA, 80 bp, synthetic construct; identical to SEQ ID NO: 34212
  source 1..80: mol_type = other DNA

SEQ ID NO: 68360 - DNA, 80 bp, synthetic construct; identical to SEQ ID NO: 12444
  source 1..80: mol_type = other DNA

SEQ ID NO: 68361 - DNA, 80 bp, synthetic construct; identical to SEQ ID NO: 34215
  source 1..80: mol_type = other DNA

SEQ ID NO: 68362 - DNA, 80 bp, synthetic construct; identical to SEQ ID NO: 34216
  source 1..80: mol_type = other DNA

SEQ ID NO: 68363 - DNA, 80 bp, synthetic construct; identical to SEQ ID NO: 34217
  source 1..80: mol_type = other DNA

SEQ ID NO: 68364 - DNA, 80 bp, synthetic construct; identical to SEQ ID NO: 12445
  source 1..80: mol_type = other DNA

SEQ ID NO: 68365 - DNA, 80 bp, synthetic construct; identical to SEQ ID NO: 34219
  source 1..80: mol_type = other DNA

SEQ ID NO: 68366 - DNA, 80 bp, synthetic construct; identical to SEQ ID NO: 34220
  source 1..80: mol_type = other DNA

SEQ ID NO: 68367 - DNA, 80 bp, synthetic construct; identical to SEQ ID NO: 34221
  source 1..80: mol_type = other DNA

SEQ ID NO: 68368 - DNA, 80 bp, synthetic construct; identical to SEQ ID NO: 12446
  source 1..80: mol_type = other DNA

SEQ ID NO: 68369 - DNA, 80 bp, synthetic construct; identical to SEQ ID NO: 34223
  source 1..80: mol_type = other DNA

SEQ ID NO: 68370 - DNA, 80 bp, synthetic construct; identical to SEQ ID NO: 34224
  source 1..80: mol_type = other DNA

SEQ ID NO: 68371 - DNA, 80 bp, synthetic construct; identical to SEQ ID NO: 12447
  source 1..80: mol_type = other DNA

SEQ ID NO: 68372 - DNA, 80 bp, synthetic construct; identical to SEQ ID NO: 34226
  source 1..80: mol_type = other DNA

SEQ ID NO: 68373 - DNA, 80 bp, synthetic construct; identical to SEQ ID NO: 34227
  source 1..80: mol_type = other DNA

SEQ ID NO: 68374 - DNA, 80 bp, synthetic construct; identical to SEQ ID NO: 12448
  source 1..80: mol_type = other DNA

SEQ ID NO: 68375 - DNA, 80 bp, synthetic construct; identical to SEQ ID NO: 34229
  source 1..80: mol_type = other DNA

SEQ ID NO: 68376 - DNA, 80 bp, synthetic construct; identical to SEQ ID NO: 34230
  source 1..80: mol_type = other DNA

SEQ ID NO: 68377 - DNA, 80 bp, synthetic construct; identical to SEQ ID NO: 34231
  source 1..80: mol_type = other DNA

SEQ ID NO: 68378 - DNA, 80 bp, synthetic construct; identical to SEQ ID NO: 12449
  source 1..80: mol_type = other DNA

SEQ ID NO: 68379 - DNA, 80 bp, synthetic construct; identical to SEQ ID NO: 34233
  source 1..80: mol_type = other DNA

SEQ ID NO: 68380 - DNA, 80 bp, synthetic construct; identical to SEQ ID NO: 34234
  source 1..80: mol_type = other DNA

SEQ ID NO: 68381 - DNA, 80 bp, synthetic construct; identical to SEQ ID NO: 34235
  source 1..80: mol_type = other DNA

SEQ ID NO: 68382 - DNA, 80 bp, synthetic construct; identical to SEQ ID NO: 34236
  source 1..80: mol_type = other DNA

SEQ ID NO: 68383 - DNA, 80 bp, synthetic construct; identical to SEQ ID NO: 12450
  source 1..80: mol_type = other DNA

SEQ ID NO: 68384 - DNA, 80 bp, synthetic construct; identical to SEQ ID NO: 34238
  source 1..80: mol_type = other DNA

SEQ ID NO: 68385 - DNA, 80 bp, synthetic construct; identical to SEQ ID NO: 12451
  source 1..80: mol_type = other DNA

SEQ ID NO: 68386 - DNA, 80 bp, synthetic construct; identical to SEQ ID NO: 34241
  source 1..80: mol_type = other DNA

SEQ ID NO: 68387 - DNA, 80 bp, synthetic construct; identical to SEQ ID NO: 34243
  source 1..80: mol_type = other DNA

SEQ ID NO: 68388 - DNA, 80 bp, synthetic construct; identical to SEQ ID NO: 34244
  source 1..80: mol_type = other DNA

SEQ ID NO: 68389 - DNA, 80 bp, synthetic construct; identical to SEQ ID NO: 12452
  source 1..80: mol_type = other DNA

SEQ ID NO: 68390 - DNA, 80 bp, synthetic construct; identical to SEQ ID NO: 34246
  source 1..80: mol_type = other DNA

SEQ ID NO: 68391 - DNA, 80 bp, synthetic construct; identical to SEQ ID NO: 34247
  source 1..80: mol_type = other DNA

SEQ ID NO: 68392 - DNA, 80 bp, synthetic construct; identical to SEQ ID NO: 12453
  source 1..80: mol_type = other DNA

SEQ ID NO: 68393 - DNA, 80 bp, synthetic construct; identical to SEQ ID NO: 34249
  source 1..80: mol_type = other DNA

SEQ ID NO: 68394 - DNA, 80 bp, synthetic construct; identical to SEQ ID NO: 34250
  source 1..80: mol_type = other DNA

SEQ ID NO: 68395 - DNA, 80 bp, synthetic construct; identical to SEQ ID NO: 34251
  source 1..80: mol_type = other DNA

SEQ ID NO: 68396 - DNA, 80 bp, synthetic construct; identical to SEQ ID NO: 12454
  source 1..80: mol_type = other DNA

SEQ ID NO: 68397 - DNA, 80 bp, synthetic construct; identical to SEQ ID NO: 34254
  source 1..80: mol_type = other DNA

SEQ ID NO: 68398 - DNA, 80 bp, synthetic construct; identical to SEQ ID NO: 34255
  source 1..80: mol_type = other DNA

SEQ ID NO: 68399 - DNA, 80 bp, synthetic construct; identical to SEQ ID NO: 34256
  source 1..80: mol_type = other DNA

SEQ ID NO: 68400 - DNA, 80 bp, synthetic construct; identical to SEQ ID NO: 12455
  source 1..80: mol_type = other DNA

SEQ ID NO: 68401 - DNA, 80 bp, synthetic construct; identical to SEQ ID NO: 34258
  source 1..80: mol_type = other DNA

SEQ ID NO: 68402 - DNA, 80 bp, synthetic construct; identical to SEQ ID NO: 34259
  source 1..80: mol_type = other DNA

SEQ ID NO: 68403 - DNA, 80 bp, synthetic construct; identical to SEQ ID NO: 12456
  source 1..80: mol_type = other DNA

SEQ ID NO: 68404 - DNA, 80 bp, synthetic construct; identical to SEQ ID NO: 34261
  source 1..80: mol_type = other DNA

SEQ ID NO: 68405 - DNA, 80 bp, synthetic construct; identical to SEQ ID NO: 34262
  source 1..80: mol_type = other DNA

SEQ ID NO: 68406 - DNA, 80 bp, synthetic construct; identical to SEQ ID NO: 34263
  source 1..80: mol_type = other DNA

SEQ ID NO: 68407 - DNA, 80 bp, synthetic construct; identical to SEQ ID NO: 34264
  source 1..80: mol_type = other DNA

SEQ ID NO: 68408 - DNA, 80 bp, synthetic construct; identical to SEQ ID NO: 12457
  source 1..80: mol_type = other DNA

SEQ ID NO: 68409 - DNA, 80 bp, synthetic construct; identical to SEQ ID NO: 34266
  source 1..80: mol_type = other DNA

SEQ ID NO: 68410 - DNA, 80 bp, synthetic construct; identical to SEQ ID NO: 12458
  source 1..80: mol_type = other DNA

SEQ ID NO: 68411 - DNA, 80 bp, synthetic construct; identical to SEQ ID NO: 34269
  source 1..80: mol_type = other DNA

SEQ ID NO: 68412 - DNA, 80 bp, synthetic construct; identical to SEQ ID NO: 34270
  source 1..80: mol_type = other DNA

SEQ ID NO: 68413 - DNA, 80 bp, synthetic construct; identical to SEQ ID NO: 34271
  source 1..80: mol_type = other DNA

SEQ ID NO: 68414 - DNA, 80 bp, synthetic construct; identical to SEQ ID NO: 12459
  source 1..80: mol_type = other DNA

SEQ ID NO: 68415 - DNA, 80 bp, synthetic construct; identical to SEQ ID NO: 34273
  source 1..80: mol_type = other DNA

SEQ ID NO: 68416 - DNA, 80 bp, synthetic construct; identical to SEQ ID NO: 34274
  source 1..80: mol_type = other DNA

SEQ ID NO: 68417 - DNA, 80 bp, synthetic construct; identical to SEQ ID NO: 34275
  source 1..80: mol_type = other DNA

SEQ ID NO: 68418 - DNA, 80 bp, synthetic construct; identical to SEQ ID NO: 34276
  source 1..80: mol_type = other DNA

SEQ ID NO: 68419 - DNA, 80 bp, synthetic construct; identical to SEQ ID NO: 12460
  source 1..80: mol_type = other DNA

SEQ ID NO: 68420 - DNA, 80 bp, synthetic construct; identical to SEQ ID NO: 34278
  source 1..80: mol_type = other DNA

SEQ ID NO: 68421 - DNA, 80 bp, synthetic construct; identical to SEQ ID NO: 34279
  source 1..80: mol_type = other DNA

SEQ ID NO: 68422 - DNA, 80 bp, synthetic construct; identical to SEQ ID NO: 12461
  source 1..80: mol_type = other DNA

SEQ ID NO: 68423 - DNA, 80 bp, synthetic construct; identical to SEQ ID NO: 34282
  source 1..80: mol_type = other DNA

SEQ ID NO: 68424 - DNA, 80 bp, synthetic construct; identical to SEQ ID NO: 34283
  source 1..80: mol_type = other DNA

SEQ ID NO: 68425 - DNA, 80 bp, synthetic construct; identical to SEQ ID NO: 34284
  source 1..80: mol_type = other DNA

SEQ ID NO: 68426 - DNA, 80 bp, synthetic construct; identical to SEQ ID NO: 12462
  source 1..80: mol_type = other DNA

SEQ ID NO: 68427 - DNA, 80 bp, synthetic construct; identical to SEQ ID NO: 34286
  source 1..80: mol_type = other DNA

SEQ ID NO: 68428 - DNA, 80 bp, synthetic construct; identical to SEQ ID NO: 34287
  source 1..80: mol_type = other DNA

SEQ ID NO: 68429 - DNA, 80 bp, synthetic construct; identical to SEQ ID NO: 12463
  source 1..80: mol_type = other DNA

SEQ ID NO: 68430 - DNA, 80 bp, synthetic construct; identical to SEQ ID NO: 34289
  source 1..80: mol_type = other DNA

SEQ ID NO: 68431 - DNA, 80 bp, synthetic construct; identical to SEQ ID NO: 34290
  source 1..80: mol_type = other DNA

SEQ ID NO: 68432 - DNA, 80 bp, synthetic construct; identical to SEQ ID NO: 34291
  source 1..80: mol_type = other DNA

SEQ ID NO: 68433 - DNA, 80 bp, synthetic construct; identical to SEQ ID NO: 12464
  source 1..80: mol_type = other DNA

SEQ ID NO: 68434 - DNA, 80 bp, synthetic construct; identical to SEQ ID NO: 34293
  source 1..80: mol_type = other DNA

SEQ ID NO: 68435 - DNA, 80 bp, synthetic construct; identical to SEQ ID NO: 34294
  source 1..80: mol_type = other DNA

SEQ ID NO: 68436 - DNA, 80 bp, synthetic construct; identical to SEQ ID NO: 34295
  source 1..80: mol_type = other DNA

SEQ ID NO: 68437 - DNA, 80 bp, synthetic construct; identical to SEQ ID NO: 12465
  source 1..80: mol_type = other DNA

SEQ ID NO: 68438 - DNA, 80 bp, synthetic construct; identical to SEQ ID NO: 34297
  source 1..80: mol_type = other DNA

SEQ ID NO: 68439 - DNA, 80 bp, synthetic construct; identical to SEQ ID NO: 34298
  source 1..80: mol_type = other DNA

SEQ ID NO: 68440 - DNA, 80 bp, synthetic construct; identical to SEQ ID NO: 34299
  source 1..80: mol_type = other DNA

SEQ ID NO: 68441 - DNA, 80 bp, synthetic construct; identical to SEQ ID NO: 34300
  source 1..80: mol_type = other DNA

SEQ ID NO: 68442 - DNA, 80 bp, synthetic construct; identical to SEQ ID NO: 12466
  source 1..80: mol_type = other DNA

SEQ ID NO: 68443 - DNA, 80 bp, synthetic construct; identical to SEQ ID NO: 34302
  source 1..80: mol_type = other DNA

SEQ ID NO: 68444 - DNA, 80 bp, synthetic construct; identical to SEQ ID NO: 34303
  source 1..80: mol_type = other DNA

SEQ ID NO: 68445 - DNA, 80 bp, synthetic construct; identical to SEQ ID NO: 12467
  source 1..80: mol_type = other DNA

SEQ ID NO: 68446 - DNA, 80 bp, synthetic construct; identical to SEQ ID NO: 34305
  source 1..80: mol_type = other DNA

SEQ ID NO: 68447 - DNA, 80 bp, synthetic construct; identical to SEQ ID NO: 34306
  source 1..80: mol_type = other DNA

SEQ ID NO: 68448 - DNA, 80 bp, synthetic construct; identical to SEQ ID NO: 34307
  source 1..80: mol_type = other DNA

SEQ ID NO: 68449 - DNA, 80 bp, synthetic construct; identical to SEQ ID NO: 34308
  source 1..80: mol_type = other DNA

SEQ ID NO: 68450 - DNA, 80 bp, synthetic construct; identical to SEQ ID NO: 12468
  source 1..80: mol_type = other DNA

SEQ ID NO: 68451 - DNA, 80 bp, synthetic construct; identical to SEQ ID NO: 34310
  source 1..80: mol_type = other DNA

SEQ ID NO: 68452 - DNA, 80 bp, synthetic construct; identical to SEQ ID NO: 34311
  source 1..80: mol_type = other DNA

SEQ ID NO: 68453 - DNA, 80 bp, synthetic construct; identical to SEQ ID NO: 34312
  source 1..80: mol_type = other DNA

SEQ ID NO: 68454 - DNA, 80 bp, synthetic construct; identical to SEQ ID NO: 12469
  source 1..80: mol_type = other DNA

SEQ ID NO: 68455 - DNA, 80 bp, synthetic construct; identical to SEQ ID NO: 34314
  source 1..80: mol_type = other DNA

SEQ ID NO: 68456 - DNA, 80 bp, synthetic construct; identical to SEQ ID NO: 34315
  source 1..80: mol_type = other DNA

SEQ ID NO: 68457 - DNA, 80 bp, synthetic construct; identical to SEQ ID NO: 12470
  source 1..80: mol_type = other DNA

SEQ ID NO: 68458 - DNA, 80 bp, synthetic construct; identical to SEQ ID NO: 34317
  source 1..80: mol_type = other DNA

SEQ ID NO: 68459 - DNA, 80 bp, synthetic construct; identical to SEQ ID NO: 34318
  source 1..80: mol_type = other DNA

SEQ ID NO: 68460 - DNA, 80 bp, synthetic construct; identical to SEQ ID NO: 34319
  source 1..80: mol_type = other DNA

SEQ ID NO: 68461 - DNA, 80 bp, synthetic construct; identical to SEQ ID NO: 34320
  source 1..80: mol_type = other DNA

SEQ ID NO: 68462 - DNA, 80 bp, synthetic construct; identical to SEQ ID NO: 12471
  source 1..80: mol_type = other DNA

SEQ ID NO: 68463 - DNA, 80 bp, synthetic construct; identical to SEQ ID NO: 34322
  source 1..80: mol_type = other DNA

SEQ ID NO: 68464 - DNA, 80 bp, synthetic construct; identical to SEQ ID NO: 34323
  source 1..80: mol_type = other DNA

SEQ ID NO: 68465 - DNA, 80 bp, synthetic construct; identical to SEQ ID NO: 12472
  source 1..80: mol_type = other DNA

SEQ ID NO: 68466 - DNA, 80 bp, synthetic construct; identical to SEQ ID NO: 34325
  source 1..80: mol_type = other DNA

SEQ ID NO: 68467 - DNA, 80 bp, synthetic construct; identical to SEQ ID NO: 34326
  source 1..80: mol_type = other DNA

SEQ ID NO: 68468 - DNA, 80 bp, synthetic construct; identical to SEQ ID NO: 34327
  source 1..80: mol_type = other DNA

SEQ ID NO: 68469 - DNA, 80 bp, synthetic construct; identical to SEQ ID NO: 34328
  source 1..80: mol_type = other DNA

SEQ ID NO: 68470 - DNA, 80 bp, synthetic construct; identical to SEQ ID NO: 12473
  source 1..80: mol_type = other DNA

SEQ ID NO: 68471 - DNA, 80 bp, synthetic construct; identical to SEQ ID NO: 34330
  source 1..80: mol_type = other DNA

SEQ ID NO: 68472 - DNA, 80 bp, synthetic construct; identical to SEQ ID NO: 34331
  source 1..80: mol_type = other DNA

SEQ ID NO: 68473 - DNA, 80 bp, synthetic construct; identical to SEQ ID NO: 34332
  source 1..80: mol_type = other DNA

SEQ ID NO: 68474 - DNA, 80 bp, synthetic construct; identical to SEQ ID NO: 12474
  source 1..80: mol_type = other DNA

SEQ ID NO: 68475 - DNA, 80 bp, synthetic construct; identical to SEQ ID NO: 34334
  source 1..80: mol_type = other DNA

SEQ ID NO: 68476 - DNA, 80 bp, synthetic construct; identical to SEQ ID NO: 34335
  source 1..80: mol_type = other DNA

SEQ ID NO: 68477 - DNA, 80 bp, synthetic construct; identical to SEQ ID NO: 34336
  source 1..80: mol_type = other DNA

SEQ ID NO: 68478 - DNA, 80 bp, synthetic construct; identical to SEQ ID NO: 34337
  source 1..80: mol_type = other DNA

SEQ ID NO: 68479 - DNA, 80 bp, synthetic construct; identical to SEQ ID NO: 12475
  source 1..80: mol_type = other DNA

SEQ ID NO: 68480 - DNA, 80 bp, synthetic construct; identical to SEQ ID NO: 34339
  source 1..80: mol_type = other DNA

SEQ ID NO: 68481 - DNA, 80 bp, synthetic construct; identical to SEQ ID NO: 34340
  source 1..80: mol_type = other DNA

SEQ ID NO: 68482 - DNA, 80 bp, synthetic construct; identical to SEQ ID NO: 12476
  source 1..80: mol_type = other DNA

SEQ ID NO: 68483 - DNA, 80 bp, synthetic construct; identical to SEQ ID NO: 34342
  source 1..80: mol_type = other DNA

SEQ ID NO: 68484 - DNA, 80 bp, synthetic construct; identical to SEQ ID NO: 34343
  source 1..80: mol_type = other DNA

SEQ ID NO: 68485 - DNA, 80 bp, synthetic construct; identical to SEQ ID NO: 34344
  source 1..80: mol_type = other DNA

SEQ ID NO: 68486 - DNA, 80 bp, synthetic construct; identical to SEQ ID NO: 12477
  source 1..80: mol_type = other DNA

SEQ ID NO: 68487 - DNA, 80 bp, synthetic construct; identical to SEQ ID NO: 34346
  source 1..80: mol_type = other DNA

SEQ ID NO: 68488 - DNA, 80 bp, synthetic construct; identical to SEQ ID NO: 34347
  source 1..80: mol_type = other DNA

SEQ ID NO: 68489 - DNA, 80 bp, synthetic construct; identical to SEQ ID NO: 34348
  source 1..80: mol_type = other DNA

SEQ ID NO: 68490 - DNA, 80 bp, synthetic construct; identical to SEQ ID NO: 12478
  source 1..80: mol_type = other DNA

SEQ ID NO: 68491 - DNA, 80 bp, synthetic construct; identical to SEQ ID NO: 34350
  source 1..80: mol_type = other DNA

SEQ ID NO: 68492 - DNA, 80 bp, synthetic construct; identical to SEQ ID NO: 34351
  source 1..80: mol_type = other DNA

SEQ ID NO: 68493 - DNA, 80 bp, synthetic construct; identical to SEQ ID NO: 34352
  source 1..80: mol_type = other DNA

SEQ ID NO: 68494 - DNA, 80 bp, synthetic construct; identical to SEQ ID NO: 12479
  source 1..80: mol_type = other DNA

SEQ ID NO: 68495 - DNA, 80 bp, synthetic construct; identical to SEQ ID NO: 34354
  source 1..80: mol_type = other DNA

SEQ ID NO: 68496 - DNA, 80 bp, synthetic construct; identical to SEQ ID NO: 34355
  source 1..80: mol_type = other DNA

SEQ ID NO: 68497 - DNA, 80 bp, synthetic construct; identical to SEQ ID NO: 34356
  source 1..80: mol_type = other DNA

SEQ ID NO: 68498 - DNA, 80 bp, synthetic construct; identical to SEQ ID NO: 12480
  source 1..80: mol_type = other DNA

SEQ ID NO: 68499 - DNA, 80 bp, synthetic construct; identical to SEQ ID NO: 34358
  source 1..80: mol_type = other DNA

SEQ ID NO: 68500 - DNA, 80 bp, synthetic construct; identical to SEQ ID NO: 34359
  source 1..80: mol_type = other DNA

SEQ ID NO: 68501 - DNA, 80 bp, synthetic construct; identical to SEQ ID NO: 34360
  source 1..80: mol_type = other DNA

SEQ ID NO: 68502 - DNA, 80 bp, synthetic construct; identical to SEQ ID NO: 12481
  source 1..80: mol_type = other DNA

SEQ ID NO: 68503 - DNA, 80 bp, synthetic construct; identical to SEQ ID NO: 34362
  source 1..80: mol_type = other DNA

SEQ ID NO: 68504 - DNA, 80 bp, synthetic construct; identical to SEQ ID NO: 34363
  source 1..80: mol_type = other DNA

SEQ ID NO: 68505 - DNA, 80 bp, synthetic construct; identical to SEQ ID NO: 34364
  source 1..80: mol_type = other DNA

SEQ ID NO: 68506 - DNA, 80 bp, synthetic construct; identical to SEQ ID NO: 34365
  source 1..80: mol_type = other DNA

SEQ ID NO: 68507 - DNA, 80 bp, synthetic construct; identical to SEQ ID NO: 12482
  source 1..80: mol_type = other DNA

SEQ ID NO: 68508 - DNA, 80 bp, synthetic construct; identical to SEQ ID NO: 34367
  source 1..80: mol_type = other DNA

SEQ ID NO: 68509 - DNA, 80 bp, synthetic construct; identical to SEQ ID NO: 34368
  source 1..80: mol_type = other DNA

SEQ ID NO: 68510 - DNA, 80 bp, synthetic construct; identical to SEQ ID NO: 12483
  source 1..80: mol_type = other DNA

SEQ ID NO: 68511 - DNA, 80 bp, synthetic construct; identical to SEQ ID NO: 34370
  source 1..80: mol_type = other DNA

SEQ ID NO: 68512 - DNA, 80 bp, synthetic construct; identical to SEQ ID NO: 34371
  source 1..80: mol_type = other DNA

SEQ ID NO: 68513 - DNA, 80 bp, synthetic construct; identical to SEQ ID NO: 34372
  source 1..80: mol_type = other DNA

SEQ ID NO: 68514 - DNA, 80 bp, synthetic construct; identical to SEQ ID NO: 12484
  source 1..80: mol_type = other DNA

SEQ ID NO: 68515 - DNA, 80 bp, synthetic construct; identical to SEQ ID NO: 34374
  source 1..80: mol_type = other DNA

SEQ ID NO: 68516 - DNA, 80 bp, synthetic construct; identical to SEQ ID NO: 34375
  source 1..80: mol_type = other DNA

SEQ ID NO: 68517 - DNA, 80 bp, synthetic construct; identical to SEQ ID NO: 34376
  source 1..80: mol_type = other DNA

SEQ ID NO: 68518 - DNA, 80 bp, synthetic construct; identical to SEQ ID NO: 34377
  source 1..80: mol_type = other DNA

SEQ ID NO: 68519 - DNA, 80 bp, synthetic construct; identical to SEQ ID NO: 12485
  source 1..80: mol_type = other DNA

SEQ ID NO: 68520 - DNA, 80 bp, synthetic construct; identical to SEQ ID NO: 34379
  source 1..80: mol_type = other DNA

SEQ ID NO: 68521 - DNA, 80 bp, synthetic construct; identical to SEQ ID NO: 34380
  source 1..80: mol_type = other DNA

SEQ ID NO: 68522 - DNA, 80 bp, synthetic construct; identical to SEQ ID NO: 34381
  source 1..80: mol_type = other DNA

SEQ ID NO: 68523 - DNA, 80 bp, synthetic construct; identical to SEQ ID NO: 12486
  source 1..80: mol_type = other DNA

SEQ ID NO: 68524 - DNA, 80 bp, synthetic construct; identical to SEQ ID NO: 34383
  source 1..80: mol_type = other DNA

SEQ ID NO: 68525 - DNA, 80 bp, synthetic construct; identical to SEQ ID NO: 34384
  source 1..80: mol_type = other DNA

SEQ ID NO: 68526 - DNA, 80 bp, synthetic construct; identical to SEQ ID NO: 34385
  source 1..80: mol_type = other DNA

SEQ ID NO: 68527 - DNA, 80 bp, synthetic construct; identical to SEQ ID NO: 12487
  source 1..80: mol_type = other DNA

SEQ ID NO: 68528 - DNA, 80 bp, synthetic construct; identical to SEQ ID NO: 34387
  source 1..80: mol_type = other DNA

SEQ ID NO: 68529 - DNA, 80 bp, synthetic construct; identical to SEQ ID NO: 34388
  source 1..80: mol_type = other DNA

SEQ ID NO: 68530 - DNA, 80 bp, synthetic construct; identical to SEQ ID NO: 12488
  source 1..80: mol_type = other DNA

SEQ ID NO: 68531 - DNA, 80 bp, synthetic construct; identical to SEQ ID NO: 34390
  source 1..80: mol_type = other DNA

SEQ ID NO: 68532 - DNA, 80 bp, synthetic construct; identical to SEQ ID NO: 34391
  source 1..80: mol_type = other DNA

SEQ ID NO: 68533 - DNA, 80 bp, synthetic construct; identical to SEQ ID NO: 34392
  source 1..80: mol_type = other DNA

SEQ ID NO: 68534 - DNA, 80 bp, synthetic construct; identical to SEQ ID NO: 12489
  source 1..80: mol_type = other DNA

SEQ ID NO: 68535 - DNA, 80 bp, synthetic construct; identical to SEQ ID NO: 34394
  source 1..80: mol_type = other DNA

SEQ ID NO: 68536 - DNA, 80 bp, synthetic construct; identical to SEQ ID NO: 34395
  source 1..80: mol_type = other DNA

SEQ ID NO: 68537 - DNA, 80 bp, synthetic construct; identical to SEQ ID NO: 34396
  source 1..80: mol_type = other DNA

SEQ ID NO: 68538 - DNA, 80 bp, synthetic construct; identical to SEQ ID NO: 34397
  source 1..80: mol_type = other DNA

SEQ ID NO: 68539 - DNA, 80 bp, synthetic construct; identical to SEQ ID NO: 12490
  source 1..80: mol_type = other DNA

SEQ ID NO: 68540 - DNA, 80 bp, synthetic construct; identical to SEQ ID NO: 34399
  source 1..80: mol_type = other DNA

SEQ ID NO: 68541 - DNA, 80 bp, synthetic construct; identical to SEQ ID NO: 34400
  source 1..80: mol_type = other DNA

SEQ ID NO: 68542 - DNA, 80 bp, synthetic construct; identical to SEQ ID NO: 34401
  source 1..80: mol_type = other DNA

SEQ ID NO: 68543 - DNA, 80 bp, synthetic construct; identical to SEQ ID NO: 12491
  source 1..80: mol_type = other DNA

SEQ ID NO: 68544 - DNA, 80 bp, synthetic construct; identical to SEQ ID NO: 34403
  source 1..80: mol_type = other DNA

SEQ ID NO: 68545 - DNA, 80 bp, synthetic construct; identical to SEQ ID NO: 34404
  source 1..80: mol_type = other DNA

SEQ ID NO: 68546 - DNA, 80 bp, synthetic construct; identical to SEQ ID NO: 12492
  source 1..80: mol_type = other DNA

SEQ ID NO: 68547 - DNA, 80 bp, synthetic construct; identical to SEQ ID NO: 34406
  source 1..80: mol_type = other DNA

SEQ ID NO: 68548 - DNA, 80 bp, synthetic construct; identical to SEQ ID NO: 34407
  source 1..80: mol_type = other DNA

SEQ ID NO: 68549 - DNA, 80 bp, synthetic construct; identical to SEQ ID NO: 34408
  source 1..80: mol_type = other DNA

SEQ ID NO: 68550 - DNA, 80 bp, synthetic construct; identical to SEQ ID NO: 34409
  source 1..80: mol_type = other DNA

SEQ ID NO: 68551 - DNA, 80 bp, synthetic construct; identical to SEQ ID NO: 12493
  source 1..80: mol_type = other DNA

SEQ ID NO: 68552 - DNA, 80 bp, synthetic construct; identical to SEQ ID NO: 34411
  source 1..80: mol_type = other DNA

SEQ ID NO: 68553 - DNA, 80 bp, synthetic construct; identical to SEQ ID NO: 34412
  source 1..80: mol_type = other DNA

SEQ ID NO: 68554 - DNA, 80 bp, synthetic construct; identical to SEQ ID NO: 34413
  source 1..80: mol_type = other DNA

SEQ ID NO: 68555 - DNA, 80 bp, synthetic construct; identical to SEQ ID NO: 12494
  source 1..80: mol_type = other DNA

SEQ ID NO: 68556 - DNA, 80 bp, synthetic construct; identical to SEQ ID NO: 34415
  source 1..80: mol_type = other DNA

SEQ ID NO: 68557 - DNA, 80 bp, synthetic construct; identical to SEQ ID NO: 34416
  source 1..80: mol_type = other DNA

SEQ ID NO: 68558 - DNA, 80 bp, synthetic construct; identical to SEQ ID NO: 34417
  source 1..80: mol_type = other DNA

SEQ ID NO: 68559 - DNA, 80 bp, synthetic construct; identical to SEQ ID NO: 12495
  source 1..80: mol_type = other DNA

SEQ ID NO: 68560 - DNA, 80 bp, synthetic construct; identical to SEQ ID NO: 34419
  source 1..80: mol_type = other DNA

SEQ ID NO: 68561 - DNA, 80 bp, synthetic construct; identical to SEQ ID NO: 34420
  source 1..80: mol_type = other DNA

SEQ ID NO: 68562 - DNA, 80 bp, synthetic construct; identical to SEQ ID NO: 34421
  source 1..80: mol_type = other DNA

SEQ ID NO: 68563 - DNA, 80 bp, synthetic construct; identical to SEQ ID NO: 12496
  source 1..80: mol_type = other DNA

SEQ ID NO: 68564 - DNA, 80 bp, synthetic construct; identical to SEQ ID NO: 34423
  source 1..80: mol_type = other DNA

SEQ ID NO: 68565 - DNA, 80 bp, synthetic construct; identical to SEQ ID NO: 34424
  source 1..80: mol_type = other DNA

SEQ ID NO: 68566 - DNA, 80 bp, synthetic construct; identical to SEQ ID NO: 34425
  source 1..80: mol_type = other DNA

SEQ ID NO: 68567 - DNA, 80 bp, synthetic construct; identical to SEQ ID NO: 12497
  source 1..80: mol_type = other DNA

SEQ ID NO: 68568 - DNA, 80 bp, synthetic construct; identical to SEQ ID NO: 34428
  source 1..80: mol_type = other DNA

SEQ ID NO: 68569 - DNA, 80 bp, synthetic construct; identical to SEQ ID NO: 12498
  source 1..80: mol_type = other DNA

SEQ ID NO: 68570 - DNA, 80 bp, synthetic construct; identical to SEQ ID NO: 34431
  source 1..80: mol_type = other DNA

SEQ ID NO: 68571 - DNA, 80 bp, synthetic construct; identical to SEQ ID NO: 34433
  source 1..80: mol_type = other DNA

SEQ ID NO: 68572 - DNA, 80 bp, synthetic construct; identical to SEQ ID NO: 12499
  source 1..80: mol_type = other DNA

SEQ ID NO: 68573 - DNA, 80 bp, synthetic construct; identical to SEQ ID NO: 34436
  source 1..80: mol_type = other DNA

SEQ ID NO: 68574 - DNA, 80 bp, synthetic construct; identical to SEQ ID NO: 12500
  source 1..80: mol_type = other DNA

SEQ ID NO: 68575 - DNA, 80 bp, synthetic construct; identical to SEQ ID NO: 34438
  source 1..80: mol_type = other DNA

SEQ ID NO: 68576 - DNA, 80 bp, synthetic construct; identical to SEQ ID NO: 34439
  source 1..80: mol_type = other DNA

SEQ ID NO: 68577 - DNA, 80 bp, synthetic construct; identical to SEQ ID NO: 34440
  source 1..80: mol_type = other DNA

SEQ ID NO: 68578 - DNA, 80 bp, synthetic construct; identical to SEQ ID NO: 34441
  source 1..80: mol_type = other DNA

SEQ ID NO: 68579 - DNA, 80 bp, synthetic construct; identical to SEQ ID NO: 12501
  source 1..80: mol_type = other DNA

SEQ ID NO: 68580 - DNA, 80 bp, synthetic construct; identical to SEQ ID NO: 34443
  source 1..80: mol_type = other DNA

SEQ ID NO: 68581 - DNA, 80 bp, synthetic construct; identical to SEQ ID NO: 34444
  source 1..80: mol_type = other DNA

SEQ ID NO: 68582 - DNA, 80 bp, synthetic construct; identical to SEQ ID NO: 12502
  source 1..80: mol_type = other DNA

SEQ ID NO: 68583 - DNA, 80 bp, synthetic construct; identical to SEQ ID NO: 34446
  source 1..80: mol_type = other DNA

SEQ ID NO: 68584 - DNA, 80 bp, synthetic construct; identical to SEQ ID NO: 34447
  source 1..80: mol_type = other DNA

SEQ ID NO: 68585 - DNA, 80 bp, synthetic construct; identical to SEQ ID NO: 34448
  source 1..80: mol_type = other DNA

SEQ ID NO: 68586 - DNA, 80 bp, synthetic construct; identical to SEQ ID NO: 34449
  source 1..80: mol_type = other DNA

SEQ ID NO: 68587 - DNA, 80 bp, synthetic construct; identical to SEQ ID NO: 12503
  source 1..80: mol_type = other DNA

SEQ ID NO: 68588 - DNA, 80 bp, synthetic construct; identical to SEQ ID NO: 34451
  source 1..80: mol_type = other DNA

SEQ ID NO: 68589 - DNA, 80 bp, synthetic construct; identical to SEQ ID NO: 34452
  source 1..80: mol_type = other DNA

SEQ ID NO: 68590 - DNA, 80 bp, synthetic construct; identical to SEQ ID NO: 12504
  source 1..80: mol_type = other DNA

SEQ ID NO: 68591 - DNA, 80 bp, synthetic construct; identical to SEQ ID NO: 34454
  source 1..80: mol_type = other DNA

SEQ ID NO: 68592 - DNA, 80 bp, synthetic construct; identical to SEQ ID NO: 34456
  source 1..80: mol_type = other DNA

SEQ ID NO: 68593 - DNA, 80 bp, synthetic construct; identical to SEQ ID NO: 12505
  source 1..80: mol_type = other DNA

SEQ ID NO: 68594 - DNA, 80 bp, synthetic construct; identical to SEQ ID NO: 34458
  source 1..80: mol_type = other DNA

SEQ ID NO: 68595 - DNA, 80 bp, synthetic construct; identical to SEQ ID NO: 34459
  source 1..80: mol_type = other DNA

SEQ ID NO: 68596 - DNA, 80 bp, synthetic construct; identical to SEQ ID NO: 34460
  source 1..80: mol_type = other DNA

SEQ ID NO: 68597 - DNA, 80 bp, synthetic construct; identical to SEQ ID NO: 12506
  source 1..80: mol_type = other DNA

SEQ ID NO: 68598 - DNA, 80 bp, synthetic construct; identical to SEQ ID NO: 34462
  source 1..80: mol_type = other DNA

SEQ ID NO: 68599 - DNA, 80 bp, synthetic construct; identical to SEQ ID NO: 34463
  source 1..80: mol_type = other DNA

SEQ ID NO: 68600 - DNA, 80 bp, synthetic construct; identical to SEQ ID NO: 34464
  source 1..80: mol_type = other DNA

SEQ ID NO: 68601 - DNA, 80 bp, synthetic construct; identical to SEQ ID NO: 34465
  source 1..80: mol_type = other DNA

SEQ ID NO: 68602 - DNA, 80 bp, synthetic construct; identical to SEQ ID NO: 12507
  source 1..80: mol_type = other DNA

SEQ ID NO: 68603 - DNA, 80 bp, synthetic construct; identical to SEQ ID NO: 34467
  source 1..80: mol_type = other DNA

SEQ ID NO: 68604 - DNA, 80 bp, synthetic construct; identical to SEQ ID NO: 12508
  source 1..80: mol_type = other DNA

SEQ ID NO: 68605 - DNA, 80 bp, synthetic construct; identical to SEQ ID NO: 34470
  source 1..80: mol_type = other DNA

SEQ ID NO: 68606 - DNA, 80 bp, synthetic construct; identical to SEQ ID NO: 34471
  source 1..80: mol_type = other DNA

SEQ ID NO: 68607 - DNA, 80 bp, synthetic construct; identical to SEQ ID NO: 34472
  source 1..80: mol_type = other DNA

SEQ ID NO: 68608 - DNA, 80 bp, synthetic construct; identical to SEQ ID NO: 12509
  source 1..80: mol_type = other DNA

SEQ ID NO: 68609 - DNA, 80 bp, synthetic construct; identical to SEQ ID NO: 34474
  source 1..80: mol_type = other DNA

SEQ ID NO: 68610 - DNA, 80 bp, synthetic construct; identical to SEQ ID NO: 34475
  source 1..80: mol_type = other DNA

SEQ ID NO: 68611 - DNA, 80 bp, synthetic construct; identical to SEQ ID NO: 34476
  source 1..80: mol_type = other DNA

SEQ ID NO: 68612 - DNA, 80 bp, synthetic construct; identical to SEQ ID NO: 12510
  source 1..80: mol_type = other DNA

SEQ ID NO: 68613 - DNA, 80 bp, synthetic construct; identical to SEQ ID NO: 34478
  source 1..80: mol_type = other DNA

SEQ ID NO: 68614 - DNA, 80 bp, synthetic construct; identical to SEQ ID NO: 34479
  source 1..80: mol_type = other DNA

SEQ ID NO: 68615 - DNA, 80 bp, synthetic construct; identical to SEQ ID NO: 34480
  source 1..80: mol_type = other DNA

SEQ ID NO: 68616 - DNA, 80 bp, synthetic construct; identical to SEQ ID NO: 34481
  source 1..80: mol_type = other DNA

SEQ ID NO: 68617 - DNA, 80 bp, synthetic construct; identical to SEQ ID NO: 12511
  source 1..80: mol_type = other DNA

SEQ ID NO: 68618 - DNA, 80 bp, synthetic construct; identical to SEQ ID NO: 34483
  source 1..80: mol_type = other DNA

SEQ ID NO: 68619 - DNA, 80 bp, synthetic construct; identical to SEQ ID NO: 34484
  source 1..80: mol_type = other DNA

SEQ ID NO: 68620 - DNA, 80 bp, synthetic construct; identical to SEQ ID NO: 34485
  source 1..80: mol_type = other DNA

SEQ ID NO: 68621 - DNA, 80 bp, synthetic construct; identical to SEQ ID NO: 12512
  source 1..80: mol_type = other DNA

SEQ ID NO: 68622 - DNA, 80 bp, synthetic construct; identical to SEQ ID NO: 34487
  source 1..80: mol_type = other DNA

SEQ ID NO: 68623 - DNA, 80 bp, synthetic construct; identical to SEQ ID NO: 34488
  source 1..80: mol_type = other DNA

SEQ ID NO: 68624 - DNA, 80 bp, synthetic construct; identical to SEQ ID NO: 34489
  source 1..80: mol_type = other DNA

SEQ ID NO: 68625 - DNA, 80 bp, synthetic construct; identical to SEQ ID NO: 12513
  source 1..80: mol_type = other DNA

SEQ ID NO: 68626 - DNA, 80 bp, synthetic construct; identical to SEQ ID NO: 34491
  source 1..80: mol_type = other DNA

SEQ ID NO: 68627 - DNA, 80 bp, synthetic construct; identical to SEQ ID NO: 34492
  source 1..80: mol_type = other DNA

SEQ ID NO: 68628 - DNA, 80 bp, synthetic construct; identical to SEQ ID NO: 34493
  source 1..80: mol_type = other DNA

SEQ ID NO: 68629 - DNA, 80 bp, synthetic construct; identical to SEQ ID NO: 12514
  source 1..80: mol_type = other DNA

SEQ ID NO: 68630 - DNA, 80 bp, synthetic construct; identical to SEQ ID NO: 34495
  source 1..80: mol_type = other DNA

SEQ ID NO: 68631 - DNA, 80 bp, synthetic construct; identical to SEQ ID NO: 34496
  source 1..80: mol_type = other DNA

SEQ ID NO: 68632 - DNA, 80 bp, synthetic construct; identical to SEQ ID NO: 12515
  source 1..80: mol_type = other DNA

SEQ ID NO: 68633 - DNA, 80 bp, synthetic construct; identical to SEQ ID NO: 34498
  source 1..80: mol_type = other DNA

SEQ ID NO: 68634 - DNA, 80 bp, synthetic construct; identical to SEQ ID NO: 34499
  source 1..80: mol_type = other DNA

SEQ ID NO: 68635 - DNA, 80 bp, synthetic construct; identical to SEQ ID NO: 34500
  source 1..80: mol_type = other DNA

SEQ ID NO: 68636 - DNA, 80 bp, synthetic construct; identical to SEQ ID NO: 12516
  source 1..80: mol_type = other DNA

SEQ ID NO: 68637 - DNA, 80 bp, synthetic construct; identical to SEQ ID NO: 34503
  source 1..80: mol_type = other DNA

SEQ ID NO: 68638 - DNA, 80 bp, synthetic construct; identical to SEQ ID NO: 34504
  source 1..80: mol_type = other DNA

SEQ ID NO: 68639 - DNA, 80 bp, synthetic construct; identical to SEQ ID NO: 12517
  source 1..80: mol_type = other DNA

SEQ ID NO: 68640 - DNA, 80 bp, synthetic construct; identical to SEQ ID NO: 34506
  source 1..80: mol_type = other DNA

SEQ ID NO: 68641 - DNA, 80 bp, synthetic construct; identical to SEQ ID NO: 34507
  source 1..80: mol_type = other DNA

SEQ ID NO: 68642 - DNA, 80 bp, synthetic construct; identical to SEQ ID NO: 34508
  source 1..80: mol_type = other DNA

SEQ ID NO: 68643 - DNA, 80 bp, synthetic construct; identical to SEQ ID NO: 34509
  source 1..80: mol_type = other DNA

SEQ ID NO: 68644 - DNA, 80 bp, synthetic construct; identical to SEQ ID NO: 34510
  source 1..80: mol_type = other DNA

SEQ ID NO: 68645 - DNA, 80 bp, synthetic construct; identical to SEQ ID NO: 12518
  source 1..80: mol_type = other DNA

SEQ ID NO: 68646 - DNA, 80 bp, synthetic construct; identical to SEQ ID NO: 34512
  source 1..80: mol_type = other DNA

SEQ ID NO: 68647 - DNA, 80 bp, synthetic construct; identical to SEQ ID NO: 34513
  source 1..80: mol_type = other DNA

SEQ ID NO: 68648 - DNA, 80 bp, synthetic construct; identical to SEQ ID NO: 12519
  source 1..80: mol_type = other DNA

SEQ ID NO: 68649 - DNA, 80 bp, synthetic construct; identical to SEQ ID NO: 34515
  source 1..80: mol_type = other DNA

SEQ ID NO: 68650 - DNA, 80 bp, synthetic construct; identical to SEQ ID NO: 34516
  source 1..80: mol_type = other DNA

SEQ ID NO: 68651 - DNA, 80 bp, synthetic construct; identical to SEQ ID NO: 34517
  source 1..80: mol_type = other DNA

SEQ ID NO: 68652 - DNA, 80 bp, synthetic construct; identical to SEQ ID NO: 12520
  source 1..80: mol_type = other DNA

SEQ ID NO: 68653 - DNA, 80 bp, synthetic construct; identical to SEQ ID NO: 34519
  source 1..80: mol_type = other DNA

SEQ ID NO: 68654 - DNA, 80 bp, synthetic construct; identical to SEQ ID NO: 34520
  source 1..80: mol_type = other DNA

SEQ ID NO: 68655 - DNA, 80 bp, synthetic construct; identical to SEQ ID NO: 34521
  source 1..80: mol_type = other DNA

SEQ ID NO: 68656 - DNA, 80 bp, synthetic construct; identical to SEQ ID NO: 34522
  source 1..80: mol_type = other DNA

SEQ ID NO: 68657 - DNA, 80 bp, synthetic construct; identical to SEQ ID NO: 12521
  source 1..80: mol_type = other DNA

SEQ ID NO: 68658 - DNA, 80 bp, synthetic construct; identical to SEQ ID NO: 34524
  source 1..80: mol_type = other DNA

SEQ ID NO: 68659 - DNA, 80 bp, synthetic construct; identical to SEQ ID NO: 34525
  source 1..80: mol_type = other DNA

SEQ ID NO: 68660 - DNA, 80 bp, synthetic construct; identical to SEQ ID NO: 12522
  source 1..80: mol_type = other DNA

SEQ ID NO: 68661 - DNA, 80 bp, synthetic construct; identical to SEQ ID NO: 34527
  source 1..80: mol_type = other DNA

SEQ ID NO: 68662 - DNA, 80 bp, synthetic construct; identical to SEQ ID NO: 34528
  source 1..80: mol_type = other DNA

SEQ ID NO: 68663 - DNA, 80 bp, synthetic construct; identical to SEQ ID NO: 34529
  source 1..80: mol_type = other DNA

SEQ ID NO: 68664 - DNA, 80 bp, synthetic construct; identical to SEQ ID NO: 12523
  source 1..80: mol_type = other DNA

SEQ ID NO: 68665 - DNA, 80 bp, synthetic construct; identical to SEQ ID NO: 34531
  source 1..80: mol_type = other DNA

SEQ ID NO: 68666 - DNA, 80 bp, synthetic construct; identical to SEQ ID NO: 34532
  source 1..80: mol_type = other DNA

SEQ ID NO: 68667 - DNA, 80 bp, synthetic construct; identical to SEQ ID NO: 34533
  source 1..80: mol_type = other DNA

SEQ ID NO: 68668 - DNA, 80 bp, synthetic construct; identical to SEQ ID NO: 12524
  source 1..80: mol_type = other DNA

SEQ ID NO: 68669 - DNA, 80 bp, synthetic construct; identical to SEQ ID NO: 34535
  source 1..80: mol_type = other DNA

SEQ ID NO: 68670 - DNA, 80 bp, synthetic construct; identical to SEQ ID NO: 34536
  source 1..80: mol_type = other DNA

SEQ ID NO: 68671 - DNA, 80 bp, synthetic construct; identical to SEQ ID NO: 34537
  source 1..80: mol_type = other DNA

SEQ ID NO: 68672 - DNA, 80 bp, synthetic construct; identical to SEQ ID NO: 34538
  source 1..80: mol_type = other DNA

SEQ ID NO: 68673 - DNA, 80 bp, synthetic construct; identical to SEQ ID NO: 12525
  source 1..80: mol_type = other DNA

SEQ ID NO: 68674 - DNA, 80 bp, synthetic construct; identical to SEQ ID NO: 34540
  source 1..80: mol_type = other DNA

SEQ ID NO: 68675 - DNA, 80 bp, synthetic construct; identical to SEQ ID NO: 34541
  source 1..80: mol_type = other DNA

SEQ ID NO: 68676 - DNA, 80 bp, synthetic construct; identical to SEQ ID NO: 12526
  source 1..80: mol_type = other DNA

SEQ ID NO: 68677 - DNA, 80 bp, synthetic construct; identical to SEQ ID NO: 34543
  source 1..80: mol_type = other DNA

SEQ ID NO: 68678 - DNA, 80 bp, synthetic construct; identical to SEQ ID NO: 34544
  source 1..80: mol_type = other DNA

SEQ ID NO: 68679 - DNA, 80 bp, synthetic construct; identical to SEQ ID NO: 34545
  source 1..80: mol_type = other DNA

SEQ ID NO: 68680 - DNA, 80 bp, synthetic construct; identical to SEQ ID NO: 12527
  source 1..80: mol_type = other DNA

SEQ ID NO: 68681 - DNA, 80 bp, synthetic construct; identical to SEQ ID NO: 34547
  source 1..80: mol_type = other DNA

SEQ ID NO: 68682 - DNA, 80 bp, synthetic construct; identical to SEQ ID NO: 34548
  source 1..80: mol_type = other DNA

SEQ ID NO: 68683 - DNA, 80 bp, synthetic construct; identical to SEQ ID NO: 34549
  source 1..80: mol_type = other DNA

SEQ ID NO: 68684 - DNA, 80 bp, synthetic construct; identical to SEQ ID NO: 34551
  source 1..80: mol_type = other DNA

SEQ ID NO: 68685 - DNA, 80 bp, synthetic construct; identical to SEQ ID NO: 34552
  source 1..80: mol_type = other DNA

SEQ ID NO: 68686 - DNA, 80 bp, synthetic construct; identical to SEQ ID NO: 34553
  source 1..80: mol_type = other DNA

SEQ ID NO: 68687 - DNA, 80 bp, synthetic construct; identical to SEQ ID NO: 12529
  source 1..80: mol_type = other DNA

SEQ ID NO: 68688 - DNA, 80 bp, synthetic construct; identical to SEQ ID NO: 34555
  source 1..80: mol_type = other DNA

SEQ ID NO: 68689 - DNA, 80 bp, synthetic construct; identical to SEQ ID NO: 34556
  source 1..80: mol_type = other DNA

SEQ ID NO: 68690 - DNA, 80 bp, synthetic construct; identical to SEQ ID NO: 34557
  source 1..80: mol_type = other DNA

SEQ ID NO: 68691 - DNA, 80 bp, synthetic construct; identical to SEQ ID NO: 34558
  source 1..80: mol_type = other DNA

SEQ ID NO: 68692 - DNA, 80 bp, synthetic construct; identical to SEQ ID NO: 12530
  source 1..80: mol_type = other DNA

SEQ ID NO: 68693 - DNA, 80 bp, synthetic construct; identical to SEQ ID NO: 34560
  source 1..80: mol_type = other DNA

SEQ ID NO: 68694 - DNA, 80 bp, synthetic construct; identical to SEQ ID NO: 34561
  source 1..80: mol_type = other DNA

SEQ ID NO: 68695 - DNA, 80 bp, synthetic construct; identical to SEQ ID NO: 34562
  source 1..80: mol_type = other DNA

SEQ ID NO: 68696 - DNA, 80 bp, synthetic construct; identical to SEQ ID NO: 34563
  source 1..80: mol_type = other DNA

SEQ ID NO: 68697 - DNA, 80 bp, synthetic construct; identical to SEQ ID NO: 12531
  source 1..80: mol_type = other DNA

SEQ ID NO: 68698 - DNA, 80 bp, synthetic construct; identical to SEQ ID NO: 34565
  source 1..80: mol_type = other DNA

SEQ ID NO: 68699 - DNA, 80 bp, synthetic construct; identical to SEQ ID NO: 34566
  source 1..80: mol_type = other DNA

SEQ ID NO: 68700 - DNA, 80 bp, synthetic construct; identical to SEQ ID NO: 12532
  source 1..80: mol_type = other DNA

SEQ ID NO: 68701 - DNA, 80 bp, synthetic construct; identical to SEQ ID NO: 34568
  source 1..80: mol_type = other DNA

SEQ ID NO: 68702 - DNA, 80 bp, synthetic construct; identical to SEQ ID NO: 34569
  source 1..80: mol_type = other DNA

SEQ ID NO: 68703 - DNA, 80 bp, synthetic construct; identical to SEQ ID NO: 34570
  source 1..80: mol_type = other DNA

SEQ ID NO: 68704 - DNA, 80 bp, synthetic construct; identical to SEQ ID NO: 34571
  source 1..80: mol_type = other DNA

SEQ ID NO: 68705 - DNA, 80 bp, synthetic construct; identical to SEQ ID NO: 12533
  source 1..80: mol_type = other DNA

SEQ ID NO: 68706 - DNA, 80 bp, synthetic construct; identical to SEQ ID NO: 34573
  source 1..80: mol_type = other DNA

SEQ ID NO: 68707 - DNA, 80 bp, synthetic construct; identical to SEQ ID NO: 34574
  source 1..80: mol_type = other DNA

SEQ ID NO: 68708 - DNA, 80 bp, synthetic construct; identical to SEQ ID NO: 12534
  source 1..80: mol_type = other DNA

SEQ ID NO: 68709 - DNA, 80 bp, synthetic construct; identical to SEQ ID NO: 34576
  source 1..80: mol_type = other DNA

SEQ ID NO: 68710 - DNA, 80 bp, synthetic construct; identical to SEQ ID NO: 34577
  source 1..80: mol_type = other DNA

SEQ ID NO: 68711 - DNA, 80 bp, synthetic construct; identical to SEQ ID NO: 34578
  source 1..80: mol_type = other DNA

SEQ ID NO: 68712 - DNA, 80 bp, synthetic construct; identical to SEQ ID NO: 12535
  source 1..80: mol_type = other DNA

SEQ ID NO: 68713 - DNA, 80 bp, synthetic construct; identical to SEQ ID NO: 34580
  source 1..80: mol_type = other DNA

SEQ ID NO: 68714 - DNA, 80 bp, synthetic construct; identical to SEQ ID NO: 34581
  source 1..80: mol_type = other DNA

SEQ ID NO: 68715 - DNA, 80 bp, synthetic construct; identical to SEQ ID NO: 34582
  source 1..80: mol_type = other DNA

SEQ ID NO: 68716 - DNA, 80 bp, synthetic construct; identical to SEQ ID NO: 12536
  source 1..80: mol_type = other DNA

SEQ ID NO: 68717 - DNA, 80 bp, synthetic construct; identical to SEQ ID NO: 34584
  source 1..80: mol_type = other DNA

SEQ ID NO: 68718 - DNA, 80 bp, synthetic construct; identical to SEQ ID NO: 34585
  source 1..80: mol_type = other DNA

SEQ ID NO: 68719 - DNA, 80 bp, synthetic construct; identical to SEQ ID NO: 12537
  source 1..80: mol_type = other DNA

SEQ ID NO: 68720 - DNA, 80 bp, synthetic construct; identical to SEQ ID NO: 34589
  source 1..80: mol_type = other DNA

SEQ ID NO: 68721 - DNA, 80 bp, synthetic construct; identical to SEQ ID NO: 34590
  source 1..80: mol_type = other DNA

SEQ ID NO: 68722 - DNA, 80 bp, synthetic construct; identical to SEQ ID NO: 12538
  source 1..80: mol_type = other DNA

SEQ ID NO: 68723 - DNA, 80 bp, synthetic construct; identical to SEQ ID NO: 34592
  source 1..80: mol_type = other DNA

SEQ ID NO: 68724 - DNA, 80 bp, synthetic construct; identical to SEQ ID NO: 34593
  source 1..80: mol_type = other DNA

SEQ ID NO: 68725 - DNA, 80 bp, synthetic construct; identical to SEQ ID NO: 34594
  source 1..80: mol_type = other DNA

SEQ ID NO: 68726 - DNA, 80 bp, synthetic construct; identical to SEQ ID NO: 12539
  source 1..80: mol_type = other DNA

SEQ ID NO: 68727 - DNA, 80 bp, synthetic construct; identical to SEQ ID NO: 34596
  source 1..80: mol_type = other DNA

SEQ ID NO: 68728 - DNA, 80 bp, synthetic construct; identical to SEQ ID NO: 34597
  source 1..80: mol_type = other DNA

SEQ ID NO: 68729 - DNA, 80 bp, synthetic construct; identical to SEQ ID NO: 34598
  source 1..80: mol_type = other DNA

SEQ ID NO: 68730 - DNA, 80 bp, synthetic construct; identical to SEQ ID NO: 34599
  source 1..80: mol_type = other DNA

SEQ ID NO: 68731 - DNA, 80 bp, synthetic construct; identical to SEQ ID NO: 12540
  source 1..80: mol_type = other DNA

SEQ ID NO: 68732 - DNA, 80 bp, synthetic construct; identical to SEQ ID NO: 34601
  source 1..80: mol_type = other DNA

SEQ ID NO: 68733 - DNA, 80 bp, synthetic construct; identical to SEQ ID NO: 34602
  source 1..80: mol_type = other DNA

SEQ ID NO: 68734 - DNA, 80 bp, synthetic construct; identical to SEQ ID NO: 12541
  source 1..80: mol_type = other DNA

SEQ ID NO: 68735 - DNA, 80 bp, synthetic construct; identical to SEQ ID NO: 34604
  source 1..80: mol_type = other DNA

SEQ ID NO: 68736 - DNA, 80 bp, synthetic construct; identical to SEQ ID NO: 34605
  source 1..80: mol_type = other DNA

SEQ ID NO: 68737 - DNA, 80 bp, synthetic construct; identical to SEQ ID NO: 34606
  source 1..80: mol_type = other DNA

SEQ ID NO: 68738 - DNA, 80 bp, synthetic construct; identical to SEQ ID NO: 12542
  source 1..80: mol_type = other DNA

SEQ ID NO: 68739 - DNA, 80 bp, synthetic construct; identical to SEQ ID NO: 34608
  source 1..80: mol_type = other DNA

SEQ ID NO: 68740 - DNA, 80 bp, synthetic construct; identical to SEQ ID NO: 34609
  source 1..80: mol_type = other DNA

SEQ ID NO: 68741 - DNA, 80 bp, synthetic construct; identical to SEQ ID NO: 34610
  source 1..80: mol_type = other DNA

SEQ ID NO: 68742 - DNA, 80 bp, synthetic construct; identical to SEQ ID NO: 34611
  source 1..80: mol_type = other DNA

SEQ ID NO: 68743 - DNA, 80 bp, synthetic construct; identical to SEQ ID NO: 12543
  source 1..80: mol_type = other DNA

SEQ ID NO: 68744 - DNA, 80 bp, synthetic construct; identical to SEQ ID NO: 34614
  source 1..80: mol_type = other DNA

SEQ ID NO: 68745 - DNA, 80 bp, synthetic construct; identical to SEQ ID NO: 34615
  source 1..80: mol_type = other DNA

SEQ ID NO: 68746 - DNA, 80 bp, synthetic construct; identical to SEQ ID NO: 12544
  source 1..80: mol_type = other DNA

SEQ ID NO: 68747 - DNA, 80 bp, synthetic construct; identical to SEQ ID NO: 34617
  source 1..80: mol_type = other DNA

SEQ ID NO: 68748 - DNA, 80 bp, synthetic construct; identical to SEQ ID NO: 34618
  source 1..80: mol_type = other DNA

SEQ ID NO: 68749 - DNA, 80 bp, synthetic construct; identical to SEQ ID NO: 34619
  source 1..80: mol_type = other DNA

SEQ ID NO: 68750 - DNA, 80 bp, synthetic construct; identical to SEQ ID NO: 12545
  source 1..80: mol_type = other DNA

SEQ ID NO: 68751 - DNA, 80 bp, synthetic construct; identical to SEQ ID NO: 34621
  source 1..80: mol_type = other DNA

SEQ ID NO: 68752 - DNA, 80 bp, synthetic construct; identical to SEQ ID NO: 34622
  source 1..80: mol_type = other DNA

SEQ ID NO: 68753 - DNA, 80 bp, synthetic construct; identical to SEQ ID NO: 34623
  source 1..80: mol_type = other DNA

SEQ ID NO: 68754 - DNA, 80 bp, synthetic construct; identical to SEQ ID NO: 12546
  source 1..80: mol_type = other DNA

SEQ ID NO: 68755 - DNA, 80 bp, synthetic construct; identical to SEQ ID NO: 34625
  source 1..80: mol_type = other DNA

SEQ ID NO: 68756 - DNA, 80 bp, synthetic construct; identical to SEQ ID NO: 34626
  source 1..80: mol_type = other DNA

SEQ ID NO: 68757 - DNA, 80 bp, synthetic construct; identical to SEQ ID NO: 34627
  source 1..80: mol_type = other DNA

SEQ ID NO: 68758 - DNA, 80 bp, synthetic construct; identical to SEQ ID NO: 12547
  source 1..80: mol_type = other DNA

SEQ ID NO: 68759 - DNA, 80 bp, synthetic construct; identical to SEQ ID NO: 34629
  source 1..80: mol_type = other DNA

SEQ ID NO: 68760 - DNA, 80 bp, synthetic construct; identical to SEQ ID NO: 34630
  source 1..80: mol_type = other DNA

SEQ ID NO: 68761 - DNA, 80 bp, synthetic construct; identical to SEQ ID NO: 12548
  source 1..80: mol_type = other DNA

SEQ ID NO: 68762 - DNA, 80 bp, synthetic construct; identical to SEQ ID NO: 34632
  source 1..80: mol_type = other DNA

SEQ ID NO: 68763 - DNA, 80 bp, synthetic construct; identical to SEQ ID NO: 34633
  source 1..80: mol_type = other DNA

SEQ ID NO: 68764 - DNA, 80 bp, synthetic construct; identical to SEQ ID NO: 34634
  source 1..80: mol_type = other DNA

SEQ ID NO: 68765 - DNA, 80 bp, synthetic construct; identical to SEQ ID NO: 12549
  source 1..80: mol_type = other DNA

SEQ ID NO: 68766 - DNA, 80 bp, synthetic construct; identical to SEQ ID NO: 34636
  source 1..80: mol_type = other DNA

SEQ ID NO: 68767 - DNA, 80 bp, synthetic construct; identical to SEQ ID NO: 34637
  source 1..80: mol_type = other DNA

SEQ ID NO: 68768 - DNA, 80 bp, synthetic construct; identical to SEQ ID NO: 34638
  source 1..80: mol_type = other DNA

SEQ ID NO: 68769 - DNA, 80 bp, synthetic construct; identical to SEQ ID NO: 12550
  source 1..80: mol_type = other DNA

SEQ ID NO: 68770 - DNA, 80 bp, synthetic construct; identical to SEQ ID NO: 34640
  source 1..80: mol_type = other DNA

SEQ ID NO: 68771 - DNA, 80 bp, synthetic construct; identical to SEQ ID NO: 34641
  source 1..80: mol_type = other DNA

SEQ ID NO: 68772 - DNA, 80 bp, synthetic construct; identical to SEQ ID NO: 34642
  source 1..80: mol_type = other DNA

SEQ ID NO: 68773 - DNA, 80 bp, synthetic construct; identical to SEQ ID NO: 34643
  source 1..80: mol_type = other DNA

SEQ ID NO: 68774 - DNA, 80 bp, synthetic construct; identical to SEQ ID NO: 12551
  source 1..80: mol_type = other DNA

SEQ ID NO: 68775 - DNA, 80 bp, synthetic construct; identical to SEQ ID NO: 34645
  source 1..80: mol_type = other DNA

SEQ ID NO: 68776 - DNA, 80 bp, synthetic construct; identical to SEQ ID NO: 34646
  source 1..80: mol_type = other DNA

SEQ ID NO: 68777 - DNA, 80 bp, synthetic construct; identical to SEQ ID NO: 34647
  source 1..80: mol_type = other DNA

SEQ ID NO: 68778 - DNA, 80 bp, synthetic construct; identical to SEQ ID NO: 12552
  source 1..80: mol_type = other DNA

SEQ ID NO: 68779 - DNA, 80 bp, synthetic construct; identical to SEQ ID NO: 34649
  source 1..80: mol_type = other DNA

SEQ ID NO: 68780 - DNA, 80 bp, synthetic construct; identical to SEQ ID NO: 34650
  source 1..80: mol_type = other DNA

SEQ ID NO: 68781 - DNA, 80 bp, synthetic construct; identical to SEQ ID NO: 34651
  source 1..80: mol_type = other DNA

SEQ ID NO: 68782 - DNA, 80 bp, synthetic construct; identical to SEQ ID NO: 12553
  source 1..80: mol_type = other DNA

SEQ ID NO: 68783 - DNA, 80 bp, synthetic construct; identical to SEQ ID NO: 34653
  source 1..80: mol_type = other DNA

SEQ ID NO: 68784 - DNA, 80 bp, synthetic construct; identical to SEQ ID NO: 34654
  source 1..80: mol_type = other DNA

SEQ ID NO: 68785 - DNA, 80 bp, synthetic construct; identical to SEQ ID NO: 34655
  source 1..80: mol_type = other DNA

SEQ ID NO: 68786 - DNA, 80 bp, synthetic construct; identical to SEQ ID NO: 34656
  source 1..80: mol_type = other DNA

SEQ ID NO: 68787 - DNA, 80 bp, synthetic construct; identical to SEQ ID NO: 12554
  source 1..80: mol_type = other DNA

SEQ ID NO: 68788 - DNA, 80 bp, synthetic construct; identical to SEQ ID NO: 34658
  source 1..80: mol_type = other DNA

SEQ ID NO: 68789 - DNA, 80 bp, synthetic construct; identical to SEQ ID NO: 34659
  source 1..80: mol_type = other DNA

SEQ ID NO: 68790 - DNA, 80 bp, synthetic construct; identical to SEQ ID NO: 12555
  source 1..80: mol_type = other DNA

SEQ ID NO: 68791 - DNA, 80 bp, synthetic construct; identical to SEQ ID NO: 34661
  source 1..80: mol_type = other DNA

SEQ ID NO: 68792 - DNA, 80 bp, synthetic construct; identical to SEQ ID NO: 34662
  source 1..80: mol_type = other DNA

SEQ ID NO: 68793 - DNA, 80 bp, synthetic construct; identical to SEQ ID NO: 34663
  source 1..80: mol_type = other DNA

SEQ ID NO: 68794 - DNA, 80 bp, synthetic construct; identical to SEQ ID NO: 12556
  source 1..80: mol_type = other DNA

SEQ ID NO: 68795 - DNA, 80 bp, synthetic construct; identical to SEQ ID NO: 34665
  source 1..80: mol_type = other DNA

SEQ ID NO: 68796 - DNA, 80 bp, synthetic construct; identical to SEQ ID NO: 34666
  source 1..80: mol_type = other DNA

SEQ ID NO: 68797 - DNA, 80 bp, synthetic construct; identical to SEQ ID NO: 34667
  source 1..80: mol_type = other DNA

SEQ ID NO: 68798 - DNA, 80 bp, synthetic construct; identical to SEQ ID NO: 12557
  source 1..80: mol_type = other DNA

SEQ ID NO: 68799 - DNA, 80 bp, synthetic construct; identical to SEQ ID NO: 34669
  source 1..80: mol_type = other DNA

SEQ ID NO: 68800 - DNA, 80 bp, synthetic construct; identical to SEQ ID NO: 34670
  source 1..80: mol_type = other DNA

SEQ ID NO: 68801 - DNA, 80 bp, synthetic construct; identical to SEQ ID NO: 34671
  source 1..80: mol_type = other DNA

SEQ ID NO: 68802 - DNA, 80 bp, synthetic construct; identical to SEQ ID NO: 12558
  source 1..80: mol_type = other DNA

SEQ ID NO: 68803 - DNA, 80 bp, synthetic construct; identical to SEQ ID NO: 34673
  source 1..80: mol_type = other DNA

SEQ ID NO: 68804 - DNA, 80 bp, synthetic construct; identical to SEQ ID NO: 34674
  source 1..80: mol_type = other DNA

SEQ ID NO: 68805 - DNA, 80 bp, synthetic construct; identical to SEQ ID NO: 34675
  source 1..80: mol_type = other DNA

SEQ ID NO: 68806 - DNA, 80 bp, synthetic construct; identical to SEQ ID NO: 12559
  source 1..80: mol_type = other DNA

SEQ ID NO: 68807 - DNA, 80 bp, synthetic construct; identical to SEQ ID NO: 34677
  source 1..80: mol_type = other DNA

SEQ ID NO: 68808 - DNA, 80 bp, synthetic construct; identical to SEQ ID NO: 34678
  source 1..80: mol_type = other DNA

SEQ ID NO: 68809 - DNA, 80 bp, synthetic construct; identical to SEQ ID NO: 34679
  source 1..80: mol_type = other DNA

SEQ ID NO: 68810 - DNA, 80 bp, synthetic construct; identical to SEQ ID NO: 12560
  source 1..80: mol_type = other DNA

SEQ ID NO: 68811 - DNA, 80 bp, synthetic construct; identical to SEQ ID NO: 34681
  source 1..80: mol_type = other DNA

SEQ ID NO: 68812 - DNA, 80 bp, synthetic construct; identical to SEQ ID NO: 34683
  source 1..80: mol_type = other DNA

SEQ ID NO: 68813 - DNA, 80 bp, synthetic construct; identical to SEQ ID NO: 34684
  source 1..80: mol_type = other DNA

SEQ ID NO: 68814 - DNA, 80 bp, synthetic construct; identical to SEQ ID NO: 12561
  source 1..80: mol_type = other DNA

SEQ ID NO: 68815 - DNA, 80 bp, synthetic construct; identical to SEQ ID NO: 34686
  source 1..80: mol_type = other DNA

SEQ ID NO: 68816 - DNA, 80 bp, synthetic construct; identical to SEQ ID NO: 34687
  source 1..80: mol_type = other DNA

SEQ ID NO: 68817 - DNA, 80 bp, synthetic construct; identical to SEQ ID NO: 12562
  source 1..80: mol_type = other DNA

SEQ ID NO: 68818 - DNA, 80 bp, synthetic construct; identical to SEQ ID NO: 34689
  source 1..80: mol_type = other DNA

SEQ ID NO: 68819 - DNA, 80 bp, synthetic construct; identical to SEQ ID NO: 34690
  source 1..80: mol_type = other DNA

SEQ ID NO: 68820 - DNA, 80 bp, synthetic construct; identical to SEQ ID NO: 34691
  source 1..80: mol_type = other DNA

SEQ ID NO: 68821 - DNA, 80 bp, synthetic construct; identical to SEQ ID NO: 12563
  source 1..80: mol_type = other DNA

SEQ ID NO: 68822 - DNA, 80 bp, synthetic construct; identical to SEQ ID NO: 34693
  source 1..80: mol_type = other DNA

SEQ ID NO: 68823 - DNA, 80 bp, synthetic construct; identical to SEQ ID NO: 34694
  source 1..80: mol_type = other DNA

SEQ ID NO: 68824 - DNA, 80 bp, synthetic construct; identical to SEQ ID NO: 34695
  source 1..80: mol_type = other DNA

SEQ ID NO: 68825 - DNA, 80 bp, synthetic construct; identical to SEQ ID NO: 12564
  source 1..80: mol_type = other DNA

SEQ ID NO: 68826 - DNA, 80 bp, synthetic construct; identical to SEQ ID NO: 34697
  source 1..80: mol_type = other DNA

SEQ ID NO: 68827 - DNA, 80 bp, synthetic construct; identical to SEQ ID NO: 34698
  source 1..80: mol_type = other DNA

SEQ ID NO: 68828 - DNA, 80 bp, synthetic construct; identical to SEQ ID NO: 34699
  source 1..80: mol_type = other DNA

SEQ ID NO: 68829 - DNA, 80 bp, synthetic construct; identical to SEQ ID NO: 34700
  source 1..80: mol_type = other DNA

SEQ ID NO: 68830 - DNA, 80 bp, synthetic construct; identical to SEQ ID NO: 12565
  source 1..80: mol_type = other DNA

SEQ ID NO: 68831 - DNA, 80 bp, synthetic construct; identical to SEQ ID NO: 34702
  source 1..80: mol_type = other DNA

SEQ ID NO: 68832 - DNA, 80 bp, synthetic construct; identical to SEQ ID NO: 34703
  source 1..80: mol_type = other DNA

SEQ ID NO: 68833 - DNA, 80 bp, synthetic construct; identical to SEQ ID NO: 12566
  source 1..80: mol_type = other DNA

SEQ ID NO: 68834 - DNA, 80 bp, synthetic construct; identical to SEQ ID NO: 34706
  source 1..80: mol_type = other DNA

SEQ ID NO: 68835 - DNA, 80 bp, synthetic construct; identical to SEQ ID NO: 34708
  source 1..80: mol_type = other DNA

SEQ ID NO: 68836 - DNA, 80 bp, synthetic construct; identical to SEQ ID NO: 34710
  source 1..80: mol_type = other DNA

SEQ ID NO: 68837 - DNA, 80 bp, synthetic construct; identical to SEQ ID NO: 34712
  source 1..80: mol_type = other DNA

SEQ ID NO: 68838 - DNA, 80 bp, synthetic construct; identical to SEQ ID NO: 12568
  source 1..80: mol_type = other DNA

SEQ ID NO: 68839 - DNA, 80 bp, synthetic construct; identical to SEQ ID NO: 34714
  source 1..80: mol_type = other DNA

SEQ ID NO: 68840 - DNA, 80 bp, synthetic construct; identical to SEQ ID NO: 34715
  source 1..80: mol_type = other DNA

SEQ ID NO: 68841 - DNA, 80 bp, synthetic construct; identical to SEQ ID NO: 34716
  source 1..80: mol_type = other DNA

SEQ ID NO: 68842 - DNA, 80 bp, synthetic construct; identical to SEQ ID NO: 12569
  source 1..80: mol_type = other DNA

SEQ ID NO: 68843 - DNA, 80 bp, synthetic construct; identical to SEQ ID NO: 34718
  source 1..80: mol_type = other DNA

SEQ ID NO: 68844 - DNA, 80 bp, synthetic construct; identical to SEQ ID NO: 34719
  source 1..80: mol_type = other DNA

SEQ ID NO: 68845 - DNA, 80 bp, synthetic construct; identical to SEQ ID NO: 34720
  source 1..80: mol_type = other DNA

SEQ ID NO: 68846 - DNA, 80 bp, synthetic construct; identical to SEQ ID NO: 12570
  source 1..80: mol_type = other DNA

SEQ ID NO: 68847 - DNA, 80 bp, synthetic construct; identical to SEQ ID NO: 34722
  source 1..80: mol_type = other DNA

SEQ ID NO: 68848 - DNA, 80 bp, synthetic construct; identical to SEQ ID NO: 34723
  source 1..80: mol_type = other DNA

SEQ ID NO: 68849 - DNA, 80 bp, synthetic construct; identical to SEQ ID NO: 12571
  source 1..80: mol_type = other DNA

SEQ ID NO: 68850 - DNA, 80 bp, synthetic construct; identical to SEQ ID NO: 34726
  source 1..80: mol_type = other DNA

SEQ ID NO: 68851 - DNA, 80 bp, synthetic construct; identical to SEQ ID NO: 34727
  source 1..80: mol_type = other DNA

SEQ ID NO: 68852 - DNA, 80 bp, synthetic construct; identical to SEQ ID NO: 34728
  source 1..80: mol_type = other DNA

SEQ ID NO: 68853 - DNA, 80 bp, synthetic construct; identical to SEQ ID NO: 12572
  source 1..80: mol_type = other DNA

SEQ ID NO: 68854 - DNA, 80 bp, synthetic construct; identical to SEQ ID NO: 34730
  source 1..80: mol_type = other DNA

SEQ ID NO: 68855 - DNA, 80 bp, synthetic construct; identical to SEQ ID NO: 34731
  source 1..80: mol_type = other DNA

SEQ ID NO: 68856 - DNA, 80 bp, synthetic construct; identical to SEQ ID NO: 34732
  source 1..80: mol_type = other DNA

SEQ ID NO: 68857 - DNA, 80 bp, synthetic construct; identical to SEQ ID NO: 12573
  source 1..80: mol_type = other DNA

SEQ ID NO: 68858 - DNA, 80 bp, synthetic construct; identical to SEQ ID NO: 34734
  source 1..80: mol_type = other DNA

SEQ ID NO: 68859 - DNA, 80 bp, synthetic construct; identical to SEQ ID NO: 34735
  source 1..80: mol_type = other DNA

SEQ ID NO: 68860 - DNA, 80 bp, synthetic construct; identical to SEQ ID NO: 34736
  source 1..80: mol_type = other DNA

SEQ ID NO: 68861 - DNA, 80 bp, synthetic construct; identical to SEQ ID NO: 12574
  source 1..80: mol_type = other DNA

SEQ ID NO: 68862 - DNA, 80 bp, synthetic construct; identical to SEQ ID NO: 34738
  source 1..80: mol_type = other DNA

SEQ ID NO: 68863 - DNA, 80 bp, synthetic construct; identical to SEQ ID NO: 34739
  source 1..80: mol_type = other DNA

SEQ ID NO: 68864 - DNA, 80 bp, synthetic construct; identical to SEQ ID NO: 12575
  source 1..80: mol_type = other DNA

SEQ ID NO: 68865 - DNA, 80 bp, synthetic construct; identical to SEQ ID NO: 34741
  source 1..80: mol_type = other DNA

SEQ ID NO: 68866 - DNA, 80 bp, synthetic construct; identical to SEQ ID NO: 34742
  source 1..80: mol_type = other DNA

SEQ ID NO: 68867 - DNA, 80 bp, synthetic construct; identical to SEQ ID NO: 34743
  source 1..80: mol_type = other DNA

SEQ ID NO: 68868 - DNA, 80 bp, synthetic construct; identical to SEQ ID NO: 12576
  source 1..80: mol_type = other DNA

SEQ ID NO: 68869 - DNA, 80 bp, synthetic construct; identical to SEQ ID NO: 34746
  source 1..80: mol_type = other DNA

SEQ ID NO: 68870 - DNA, 80 bp, synthetic construct; identical to SEQ ID NO: 34747
  source 1..80: mol_type = other DNA

SEQ ID NO: 68871 - DNA, 80 bp, synthetic construct; identical to SEQ ID NO: 12577
  source 1..80: mol_type = other DNA

SEQ ID NO: 68872 - DNA, 80 bp, synthetic construct; identical to SEQ ID NO: 34749
  source 1..80: mol_type = other DNA

SEQ ID NO: 68873 - DNA, 80 bp, synthetic construct; identical to SEQ ID NO: 34750
  source 1..80: mol_type = other DNA

SEQ ID NO: 68874 - DNA, 80 bp, synthetic construct; identical to SEQ ID NO: 34751
  source 1..80: mol_type = other DNA

SEQ ID NO: 68875 - DNA, 80 bp, synthetic construct; identical to SEQ ID NO: 12578
  source 1..80: mol_type = other DNA

SEQ ID NO: 68876 - DNA, 80 bp, synthetic construct; identical to SEQ ID NO: 34753
  source 1..80: mol_type = other DNA

SEQ ID NO: 68877 - DNA, 80 bp, synthetic construct; identical to SEQ ID NO: 34754
  source 1..80: mol_type = other DNA

SEQ ID NO: 68878 - DNA, 80 bp, synthetic construct; identical to SEQ ID NO: 34755
  source 1..80: mol_type = other DNA

SEQ ID NO: 68879 - DNA, 80 bp, synthetic construct; identical to SEQ ID NO: 12579
  source 1..80: mol_type = other DNA

SEQ ID NO: 68880 - DNA, 80 bp, synthetic construct; identical to SEQ ID NO: 34757
  source 1..80: mol_type = other DNA

SEQ ID NO: 68881 - DNA, 80 bp, synthetic construct; identical to SEQ ID NO: 34758
  source 1..80: mol_type = other DNA

SEQ ID NO: 68882 - DNA, 80 bp, synthetic construct; identical to SEQ ID NO: 34759
  source 1..80: mol_type = other DNA

SEQ ID NO: 68883 - DNA, 80 bp, synthetic construct; identical to SEQ ID NO: 12580
  source 1..80: mol_type = other DNA

SEQ ID NO: 68884 - DNA, 80 bp, synthetic construct; identical to SEQ ID NO: 34761
  source 1..80: mol_type = other DNA

SEQ ID NO: 68885 - DNA, 80 bp, synthetic construct; identical to SEQ ID NO: 34762
  source 1..80: mol_type = other DNA

SEQ ID NO: 68886 - DNA, 80 bp, synthetic construct; identical to SEQ ID NO: 34763
  source 1..80: mol_type = other DNA

SEQ ID NO: 68887 - DNA, 80 bp, synthetic construct; identical to SEQ ID NO: 34764
  source 1..80: mol_type = other DNA

SEQ ID NO: 68888 - DNA, 80 bp, synthetic construct; identical to SEQ ID NO: 12581
  source 1..80: mol_type = other DNA

SEQ ID NO: 68889 - DNA, 80 bp, synthetic construct; identical to SEQ ID NO: 34766
  source 1..80: mol_type = other DNA

SEQ ID NO: 68890 - DNA, 80 bp, synthetic construct; identical to SEQ ID NO: 34767
  source 1..80: mol_type = other DNA

SEQ ID NO: 68891 - DNA, 80 bp, synthetic construct; identical to SEQ ID NO: 34768
  source 1..80: mol_type = other DNA

SEQ ID NO: 68892 - DNA, 80 bp, synthetic construct; identical to SEQ ID NO: 12582
  source 1..80: mol_type = other DNA

SEQ ID NO: 68893 - DNA, 80 bp, synthetic construct; identical to SEQ ID NO: 34770
  source 1..80: mol_type = other DNA

SEQ ID NO: 68894 - DNA, 80 bp, synthetic construct; identical to SEQ ID NO: 34771
  source 1..80: mol_type = other DNA

SEQ ID NO: 68895 - DNA, 80 bp, synthetic construct; identical to SEQ ID NO: 12583
  source 1..80: mol_type = other DNA

SEQ ID NO: 68896 - DNA, 80 bp, synthetic construct; identical to SEQ ID NO: 34773
  source 1..80: mol_type = other DNA

SEQ ID NO: 68897 - DNA, 80 bp, synthetic construct; identical to SEQ ID NO: 34774
  source 1..80: mol_type = other DNA

SEQ ID NO: 68898 - DNA, 80 bp, synthetic construct; identical to SEQ ID NO: 34775
  source 1..80: mol_type = other DNA

SEQ ID NO: 68899 - DNA, 80 bp, synthetic construct; identical to SEQ ID NO: 34776
  source 1..80: mol_type = other DNA

SEQ ID NO: 68900 - DNA, 80 bp, synthetic construct; identical to SEQ ID NO: 12584
  source 1..80: mol_type = other DNA

SEQ ID NO: 68901 - DNA, 80 bp, synthetic construct; identical to SEQ ID NO: 34778
  source 1..80: mol_type = other DNA

SEQ ID NO: 68902 - DNA, 80 bp, synthetic construct; identical to SEQ ID NO: 34779
  source 1..80: mol_type = other DNA

SEQ ID NO: 68903 - DNA, 80 bp, synthetic construct; identical to SEQ ID NO: 34780
  source 1..80: mol_type = other DNA

SEQ ID NO: 68904 - DNA, 80 bp, synthetic construct; identical to SEQ ID NO: 12585
  source 1..80: mol_type = other DNA

SEQ ID NO: 68905 - DNA, 80 bp, synthetic construct; identical to SEQ ID NO: 34782
  source 1..80: mol_type = other DNA

SEQ ID NO: 68906 - DNA, 80 bp, synthetic construct; identical to SEQ ID NO: 34783
  source 1..80: mol_type = other DNA

SEQ ID NO: 68907 - DNA, 80 bp, synthetic construct; identical to SEQ ID NO: 12586
  source 1..80: mol_type = other DNA

SEQ ID NO: 68908 - DNA, 80 bp, synthetic construct; identical to SEQ ID NO: 34785
  source 1..80: mol_type = other DNA

SEQ ID NO: 68909 - DNA, 80 bp, synthetic construct; identical to SEQ ID NO: 34786
  source 1..80: mol_type = other DNA

SEQ ID NO: 68910 - DNA, 80 bp, synthetic construct; identical to SEQ ID NO: 34787
  source 1..80: mol_type = other DNA

SEQ ID NO: 68911 - DNA, 80 bp, synthetic construct; identical to SEQ ID NO: 34788
  source 1..80: mol_type = other DNA

SEQ ID NO: 68912 - DNA, 80 bp, synthetic construct; identical to SEQ ID NO: 12587
  source 1..80: mol_type = other DNA

SEQ ID NO: 68913 - DNA, 80 bp, synthetic construct; identical to SEQ ID NO: 34790
  source 1..80: mol_type = other DNA

SEQ ID NO: 68914 - DNA, 80 bp, synthetic construct; identical to SEQ ID NO: 34791
  source 1..80: mol_type = other DNA

SEQ ID NO: 68915 - DNA, 80 bp, synthetic construct; identical to SEQ ID NO: 34792
  source 1..80: mol_type = other DNA

SEQ ID NO: 68916 - DNA, 80 bp, synthetic construct; identical to SEQ ID NO: 12588
  source 1..80: mol_type = other DNA

SEQ ID NO: 68917 - DNA, 80 bp, synthetic construct; identical to SEQ ID NO: 34794
  source 1..80: mol_type = other DNA

SEQ ID NO: 68918 - DNA, 80 bp, synthetic construct; identical to SEQ ID NO: 34795
  source 1..80: mol_type = other DNA

SEQ ID NO: 68919 - DNA, 80 bp, synthetic construct; identical to SEQ ID NO: 12589
  source 1..80: mol_type = other DNA

SEQ ID NO: 68920 - DNA, 80 bp, synthetic construct; identical to SEQ ID NO: 34797
  source 1..80: mol_type = other DNA

SEQ ID NO: 68921 - DNA, 80 bp, synthetic construct; identical to SEQ ID NO: 34798
  source 1..80: mol_type = other DNA

SEQ ID NO: 68922 - DNA, 80 bp, synthetic construct; identical to SEQ ID NO: 34799
  source 1..80: mol_type = other DNA

SEQ ID NO: 68923 - DNA, 80 bp, synthetic construct; identical to SEQ ID NO: 12590
  source 1..80: mol_type = other DNA

SEQ ID NO: 68924 - DNA, 80 bp, synthetic construct; identical to SEQ ID NO: 34801
  source 1..80: mol_type = other DNA

SEQ ID NO: 68925 - DNA, 80 bp, synthetic construct; identical to SEQ ID NO: 34802
  source 1..80: mol_type = other DNA

SEQ ID NO: 68926 - DNA, 80 bp, synthetic construct; identical to SEQ ID NO: 34803
  source 1..80: mol_type = other DNA

SEQ ID NO: 68927 - DNA, 80 bp, synthetic construct; identical to SEQ ID NO: 34804
  source 1..80: mol_type = other DNA

SEQ ID NO: 68928 - DNA, 80 bp, synthetic construct; identical to SEQ ID NO: 12591
  source 1..80: mol_type = other DNA

SEQ ID NO: 68929 - DNA, 80 bp, synthetic construct; identical to SEQ ID NO: 34806
  source 1..80: mol_type = other DNA

SEQ ID NO: 68930 - DNA, 80 bp, synthetic construct; identical to SEQ ID NO: 34807
  source 1..80: mol_type = other DNA

SEQ ID NO: 68931 - DNA, 80 bp, synthetic construct; identical to SEQ ID NO: 12592
  source 1..80: mol_type = other DNA

SEQ ID NO: 68932 - DNA, 80 bp, synthetic construct; identical to SEQ ID NO: 34809
  source 1..80: mol_type = other DNA

SEQ ID NO: 68933 - DNA, 80 bp, synthetic construct; identical to SEQ ID NO: 34810
  source 1..80: mol_type = other DNA

SEQ ID NO: 68934 - DNA, 80 bp, synthetic construct; identical to SEQ ID NO: 34811
  source 1..80: mol_type = other DNA

SEQ ID NO: 68935 - DNA, 80 bp, synthetic construct; identical to SEQ ID NO: 34812
  source 1..80: mol_type = other DNA

SEQ ID NO: 68936 - DNA, 80 bp, synthetic construct; identical to SEQ ID NO: 12593
  source 1..80: mol_type = other DNA

SEQ ID NO: 68937 - DNA, 80 bp, synthetic construct; identical to SEQ ID NO: 34814
  source 1..80: mol_type = other DNA

SEQ ID NO: 68938 - DNA, 80 bp, synthetic construct; identical to SEQ ID NO: 34815
  source 1..80: mol_type = other DNA

SEQ ID NO: 68939 - DNA, 80 bp, synthetic construct; identical to SEQ ID NO: 34816
  source 1..80: mol_type = other DNA

SEQ ID NO: 68940 - DNA, 80 bp, synthetic construct; identical to SEQ ID NO: 12594
  source 1..80: mol_type = other DNA

SEQ ID NO: 68941 - DNA, 80 bp, synthetic construct; identical to SEQ ID NO: 34818
  source 1..80: mol_type = other DNA

SEQ ID NO: 68942 - DNA, 80 bp, synthetic construct; identical to SEQ ID NO: 34819
  source 1..80: mol_type = other DNA

SEQ ID NO: 68943 - DNA, 80 bp, synthetic construct; identical to SEQ ID NO: 12595
  source 1..80: mol_type = other DNA

SEQ ID NO: 68944 - DNA, 80 bp, synthetic construct; identical to SEQ ID NO: 34821
  source 1..80: mol_type = other DNA

SEQ ID NO: 68945 - DNA, 80 bp, synthetic construct; identical to SEQ ID NO: 34822
  source 1..80: mol_type = other DNA

SEQ ID NO: 68946 - DNA, 80 bp, synthetic construct; identical to SEQ ID NO: 34823
  source 1..80: mol_type = other DNA

SEQ ID NO: 68947 - DNA, 80 bp, synthetic construct; identical to SEQ ID NO: 34824
  source 1..80: mol_type = other DNA

SEQ ID NO: 68948 - DNA, 80 bp, synthetic construct; identical to SEQ ID NO: 12596
  source 1..80: mol_type = other DNA

SEQ ID NO: 68949 - DNA, 80 bp, synthetic construct; identical to SEQ ID NO: 34826
  source 1..80: mol_type = other DNA

SEQ ID NO: 68950 - DNA, 80 bp, synthetic construct; identical to SEQ ID NO: 34827
  source 1..80: mol_type = other DNA

SEQ ID NO: 68951 - DNA, 80 bp, synthetic construct; identical to SEQ ID NO: 12597
  source 1..80: mol_type = other DNA

SEQ ID NO: 68952 - DNA, 80 bp, synthetic construct; identical to SEQ ID NO: 34829
  source 1..80: mol_type = other DNA

SEQ ID NO: 68953 - DNA, 80 bp, synthetic construct; identical to SEQ ID NO: 34830
  source 1..80: mol_type = other DNA

SEQ ID NO: 68954 - DNA, 80 bp, synthetic construct; identical to SEQ ID NO: 34831
  source 1..80: mol_type = other DNA

SEQ ID NO: 68955 - DNA, 80 bp, synthetic construct; identical to SEQ ID NO: 12598
  source 1..80: mol_type = other DNA

SEQ ID NO: 68956 - DNA, 80 bp, synthetic construct; identical to SEQ ID NO: 34833
  source 1..80: mol_type = other DNA

SEQ ID NO: 68957 - DNA, 80 bp, synthetic construct; identical to SEQ ID NO: 34834
  source 1..80: mol_type = other DNA

SEQ ID NO: 68958 - DNA, 80 bp, synthetic construct; identical to SEQ ID NO: 34835
  source 1..80: mol_type = other DNA

SEQ ID NO: 68959 - DNA, 80 bp, synthetic construct; identical to SEQ ID NO: 34836
  source 1..80: mol_type = other DNA

SEQ ID NO: 68960 - DNA, 80 bp, synthetic construct; identical to SEQ ID NO: 12599
  source 1..80: mol_type = other DNA

SEQ ID NO: 68961 - DNA, 80 bp, synthetic construct; identical to SEQ ID NO: 34838
  source 1..80: mol_type = other DNA

SEQ ID NO: 68962 - DNA, 80 bp, synthetic construct; identical to SEQ ID NO: 34839
  source 1..80: mol_type = other DNA

SEQ ID NO: 68963 - DNA, 80 bp, synthetic construct; identical to SEQ ID NO: 12600
  source 1..80: mol_type = other DNA

SEQ ID NO: 68964 - DNA, 80 bp, synthetic construct; identical to SEQ ID NO: 34841
  source 1..80: mol_type = other DNA

SEQ ID NO: 68965 - DNA, 80 bp, synthetic construct; identical to SEQ ID NO: 34842
  source 1..80: mol_type = other DNA

SEQ ID NO: 68966 - DNA, 80 bp, synthetic construct; identical to SEQ ID NO: 34843
  source 1..80: mol_type = other DNA

SEQ ID NO: 68967 - DNA, 80 bp, synthetic construct; identical to SEQ ID NO: 34844
  source 1..80: mol_type = other DNA

SEQ ID NO: 68968 - DNA, 80 bp, synthetic construct; identical to SEQ ID NO: 12601
  source 1..80: mol_type = other DNA

SEQ ID NO: 68969 - DNA, 80 bp, synthetic construct; identical to SEQ ID NO: 34846
  source 1..80: mol_type = other DNA

SEQ ID NO: 68970 - DNA, 80 bp, synthetic construct; identical to SEQ ID NO: 34847
  source 1..80: mol_type = other DNA

SEQ ID NO: 68971 - DNA, 80 bp, synthetic construct; identical to SEQ ID NO: 12602
  source 1..80: mol_type = other DNA

SEQ ID NO: 68972 - DNA, 80 bp, synthetic construct; identical to SEQ ID NO: 34849
  source 1..80: mol_type = other DNA

SEQ ID NO: 68973 - DNA, 80 bp, synthetic construct; identical to SEQ ID NO: 34850
  source 1..80: mol_type = other DNA

SEQ ID NO: 68974 - DNA, 80 bp, synthetic construct; identical to SEQ ID NO: 34851
  source 1..80: mol_type = other DNA

SEQ ID NO: 68975 - DNA, 80 bp, synthetic construct; identical to SEQ ID NO: 12603
  source 1..80: mol_type = other DNA

SEQ ID NO: 68976 - DNA, 80 bp, synthetic construct; identical to SEQ ID NO: 34853
  source 1..80: mol_type = other DNA

SEQ ID NO: 68977 - DNA, 80 bp, synthetic construct; identical to SEQ ID NO: 34854
  source 1..80: mol_type = other DNA

SEQ ID NO: 68978 - DNA, 80 bp, synthetic construct; identical to SEQ ID NO: 34855
  source 1..80: mol_type = other DNA

SEQ ID NO: 68979 - DNA, 80 bp, synthetic construct; identical to SEQ ID NO: 12604
  source 1..80: mol_type = other DNA

SEQ ID NO: 68980 - DNA, 80 bp, synthetic construct; identical to SEQ ID NO: 34857
  source 1..80: mol_type = other DNA

SEQ ID NO: 68981 - DNA, 80 bp, synthetic construct; identical to SEQ ID NO: 34858
  source 1..80: mol_type = other DNA

SEQ ID NO: 68982 - DNA, 80 bp, synthetic construct; identical to SEQ ID NO: 34860
  source 1..80: mol_type = other DNA

SEQ ID NO: 68983 - DNA, 80 bp, synthetic construct; identical to SEQ ID NO: 12605
  source 1..80: mol_type = other DNA

SEQ ID NO: 68984 - DNA, 80 bp, synthetic construct; identical to SEQ ID NO: 34862
  source 1..80: mol_type = other DNA

SEQ ID NO: 68985 - DNA, 80 bp, synthetic construct; identical to SEQ ID NO: 34863
  source 1..80: mol_type = other DNA

SEQ ID NO: 68986 - DNA, 80 bp, synthetic construct; identical to SEQ ID NO: 12606
  source 1..80: mol_type = other DNA

SEQ ID NO: 68987 - DNA, 80 bp, synthetic construct; identical to SEQ ID NO: 34865
  source 1..80: mol_type = other DNA

SEQ ID NO: 68988 - DNA, 80 bp, synthetic construct; identical to SEQ ID NO: 34866
  source 1..80: mol_type = other DNA

SEQ ID NO: 68989 - DNA, 80 bp, synthetic construct; identical to SEQ ID NO: 34867
  source 1..80: mol_type = other DNA

SEQ ID NO: 68990 - DNA, 80 bp, synthetic construct; identical to SEQ ID NO: 12607
  source 1..80: mol_type = other DNA

SEQ ID NO: 68991 - DNA, 80 bp, synthetic construct; identical to SEQ ID NO: 34869
  source 1..80: mol_type = other DNA

SEQ ID NO: 68992 - DNA, 80 bp, synthetic construct; identical to SEQ ID NO: 34870
  source 1..80: mol_type = other DNA

SEQ ID NO: 68993 - DNA, 80 bp, synthetic construct; identical to SEQ ID NO: 34871
  source 1..80: mol_type = other DNA

SEQ ID NO: 68994 - DNA, 80 bp, synthetic construct; identical to SEQ ID NO: 12608
  source 1..80: mol_type = other DNA

SEQ ID NO: 68995 - DNA, 80 bp, synthetic construct; identical to SEQ ID NO: 34873
  source 1..80: mol_type = other DNA

SEQ ID NO: 68996 - DNA, 80 bp, synthetic construct; identical to SEQ ID NO: 34874
  source 1..80: mol_type = other DNA

SEQ ID NO: 68997 - DNA, 80 bp, synthetic construct; identical to SEQ ID NO: 34875
  source 1..80: mol_type = other DNA

SEQ ID NO: 68998 - DNA, 80 bp, synthetic construct; identical to SEQ ID NO: 34876
  source 1..80: mol_type = other DNA

SEQ ID NO: 68999 - DNA, 80 bp, synthetic construct; identical to SEQ ID NO: 12609
  source 1..80: mol_type = other DNA

SEQ ID NO: 69000 - DNA, 80 bp, synthetic construct; identical to SEQ ID NO: 34878
  source 1..80: mol_type = other DNA

SEQ ID NO: 69001 - DNA, 80 bp, synthetic construct; identical to SEQ ID NO: 34879
  source 1..80: mol_type = other DNA

SEQ ID NO: 69002 - DNA, 80 bp, synthetic construct; identical to SEQ ID NO: 12610
  source 1..80: mol_type = other DNA

SEQ ID NO: 69003 - DNA, 80 bp, synthetic construct; identical to SEQ ID NO: 34881
  source 1..80: mol_type = other DNA

SEQ ID NO: 69004 - DNA, 80 bp, synthetic construct; identical to SEQ ID NO: 34882
  source 1..80: mol_type = other DNA

SEQ ID NO: 69005 - DNA, 80 bp, synthetic construct; identical to SEQ ID NO: 34883
  source 1..80: mol_type = other DNA

SEQ ID NO: 69006 - DNA, 80 bp, synthetic construct; identical to SEQ ID NO: 34884
  source 1..80: mol_type = other DNA

SEQ ID NO: 69007 - DNA, 80 bp, synthetic construct; identical to SEQ ID NO: 12611
  source 1..80: mol_type = other DNA

SEQ ID NO: 69008 - DNA, 80 bp, synthetic construct; identical to SEQ ID NO: 34886
  source 1..80: mol_type = other DNA

SEQ ID NO: 69009 - DNA, 80 bp, synthetic construct; identical to SEQ ID NO: 34887
  source 1..80: mol_type = other DNA

SEQ ID NO: 69010 - DNA, 80 bp, synthetic construct; identical to SEQ ID NO: 12612
  source 1..80: mol_type = other DNA

SEQ ID NO: 69011 - DNA, 80 bp, synthetic construct; identical to SEQ ID NO: 34889
  source 1..80: mol_type = other DNA

SEQ ID NO: 69012 - DNA, 80 bp, synthetic construct; identical to SEQ ID NO: 34890
  source 1..80: mol_type = other DNA

SEQ ID NO: 69013 - DNA, 80 bp, synthetic construct; identical to SEQ ID NO: 34891
  source 1..80: mol_type = other DNA

SEQ ID NO: 69014 - DNA, 80 bp, synthetic construct; identical to SEQ ID NO: 12613
  source 1..80: mol_type = other DNA

SEQ ID NO: 69015 - DNA, 80 bp, synthetic construct; identical to SEQ ID NO: 34893
  source 1..80: mol_type = other DNA

SEQ ID NO: 69016 - DNA, 80 bp, synthetic construct; identical to SEQ ID NO: 34894
  source 1..80: mol_type = other DNA

SEQ ID NO: 69017 - DNA, 80 bp, synthetic construct; identical to SEQ ID NO: 34895
  source 1..80: mol_type = other DNA

SEQ ID NO: 69018 - DNA, 80 bp, synthetic construct; identical to SEQ ID NO: 12614
  source 1..80: mol_type = other DNA

SEQ ID NO: 69019 - DNA, 80 bp, synthetic construct; identical to SEQ ID NO: 34897
  source 1..80: mol_type = other DNA

SEQ ID NO: 69020 - DNA, 80 bp, synthetic construct; identical to SEQ ID NO: 34898
  source 1..80: mol_type = other DNA

SEQ ID NO: 69021 - DNA, 80 bp, synthetic construct; identical to SEQ ID NO: 34899
  source 1..80: mol_type = other DNA

SEQ ID NO: 69022 - DNA, 80 bp, synthetic construct; identical to SEQ ID NO: 34900
  source 1..80: mol_type = other DNA

SEQ ID NO: 69023 - DNA, 80 bp, synthetic construct; identical to SEQ ID NO: 12615
  source 1..80: mol_type = other DNA

SEQ ID NO: 69024 - DNA, 80 bp, synthetic construct; identical to SEQ ID NO: 34902
  source 1..80: mol_type = other DNA

SEQ ID NO: 69025 - DNA, 80 bp, synthetic construct; identical to SEQ ID NO: 34903
  source 1..80: mol_type = other DNA

SEQ ID NO: 69026 - DNA, 80 bp, synthetic construct; identical to SEQ ID NO: 34904
  source 1..80: mol_type = other DNA

SEQ ID NO: 69027 - DNA, 80 bp, synthetic construct; identical to SEQ ID NO: 12616
  source 1..80: mol_type = other DNA

SEQ ID NO: 69028 - DNA, 80 bp, synthetic construct; identical to SEQ ID NO: 34906
  source 1..80: mol_type = other DNA

SEQ ID NO: 69029 - DNA, 80 bp, synthetic construct; identical to SEQ ID NO: 34907
  source 1..80: mol_type = other DNA

SEQ ID NO: 69030 - DNA, 80 bp, synthetic construct; identical to SEQ ID NO: 12617
  source 1..80: mol_type = other DNA

SEQ ID NO: 69031 - DNA, 80 bp, synthetic construct; identical to SEQ ID NO: 34909
  source 1..80: mol_type = other DNA

SEQ ID NO: 69032 - DNA, 80 bp, synthetic construct; identical to SEQ ID NO: 34910
  source 1..80: mol_type = other DNA

SEQ ID NO: 69033 - DNA, 80 bp, synthetic construct; identical to SEQ ID NO: 34911
  source 1..80: mol_type = other DNA

SEQ ID NO: 69034 - DNA, 80 bp, synthetic construct; identical to SEQ ID NO: 12618
  source 1..80: mol_type = other DNA

SEQ ID NO: 69035 - DNA, 80 bp, synthetic construct; identical to SEQ ID NO: 34913
  source 1..80: mol_type = other DNA

SEQ ID NO: 69036 - DNA, 80 bp, synthetic construct; identical to SEQ ID NO: 34914
  source 1..80: mol_type = other DNA

SEQ ID NO: 69037 - DNA, 80 bp, synthetic construct; identical to SEQ ID NO: 34915
  source 1..80: mol_type = other DNA

SEQ ID NO: 69038 - DNA, 80 bp, synthetic construct; identical to SEQ ID NO: 12619
  source 1..80: mol_type = other DNA

SEQ ID NO: 69039 - DNA, 80 bp, synthetic construct; identical to SEQ ID NO: 34917
  source 1..80: mol_type = other DNA

SEQ ID NO: 69040 - DNA, 80 bp, synthetic construct; identical to SEQ ID NO: 34918
  source 1..80: mol_type = other DNA

SEQ ID NO: 69041 - DNA, 80 bp, synthetic construct; identical to SEQ ID NO: 34919
  source 1..80: mol_type = other DNA

SEQ ID NO: 69042 - DNA, 80 bp, synthetic construct; identical to SEQ ID NO: 34920
  source 1..80: mol_type = other DNA

SEQ ID NO: 69043 - DNA, 80 bp, synthetic construct; identical to SEQ ID NO: 12620
  source 1..80: mol_type = other DNA

SEQ ID NO: 69044 - DNA, 80 bp, synthetic construct; identical to SEQ ID NO: 34922
  source 1..80: mol_type = other DNA

SEQ ID NO: 69045 - DNA, 80 bp, synthetic construct; identical to SEQ ID NO: 34923
  source 1..80: mol_type = other DNA

SEQ ID NO: 69046 - DNA, 80 bp, synthetic construct; identical to SEQ ID NO: 34924
  source 1..80: mol_type = other DNA

SEQ ID NO: 69047 - DNA, 80 bp, synthetic construct; identical to SEQ ID NO: 12621
  source 1..80: mol_type = other DNA

SEQ ID NO: 69048 - DNA, 80 bp, synthetic construct; identical to SEQ ID NO: 34926
  source 1..80: mol_type = other DNA

SEQ ID NO: 69049 - DNA, 80 bp, synthetic construct; identical to SEQ ID NO: 34927
  source 1..80: mol_type = other DNA

SEQ ID NO: 69050 - DNA, 80 bp, synthetic construct; identical to SEQ ID NO: 12622
  source 1..80: mol_type = other DNA

SEQ ID NO: 69051 - DNA, 80 bp, synthetic construct; identical to SEQ ID NO: 34929
  source 1..80: mol_type = other DNA

SEQ ID NO: 69052 - DNA, 80 bp, synthetic construct; identical to SEQ ID NO: 34930
  source 1..80: mol_type = other DNA

SEQ ID NO: 69053 - DNA, 80 bp, synthetic construct; identical to SEQ ID NO: 34931
  source 1..80: mol_type = other DNA

SEQ ID NO: 69054 - DNA, 80 bp, synthetic construct; identical to SEQ ID NO: 34932
  source 1..80: mol_type = other DNA

SEQ ID NO: 69055 - DNA, 80 bp, synthetic construct; identical to SEQ ID NO: 12623
  source 1..80: mol_type = other DNA

SEQ ID NO: 69056 - DNA, 80 bp, synthetic construct; identical to SEQ ID NO: 34934
  source 1..80: mol_type = other DNA

SEQ ID NO: 69057 - DNA, 80 bp, synthetic construct; identical to SEQ ID NO: 34935
  source 1..80: mol_type = other DNA

SEQ ID NO: 69058 - DNA, 80 bp, synthetic construct; identical to SEQ ID NO: 34936
  source 1..80: mol_type = other DNA

SEQ ID NO: 69059 - DNA, 80 bp, synthetic construct; identical to SEQ ID NO: 12624
  source 1..80: mol_type = other DNA

SEQ ID NO: 69060 - DNA, 80 bp, synthetic construct; identical to SEQ ID NO: 34938
  source 1..80: mol_type = other DNA

SEQ ID NO: 69061 - DNA, 80 bp, synthetic construct; identical to SEQ ID NO: 34939
  source 1..80: mol_type = other DNA

SEQ ID NO: 69062 - DNA, 80 bp, synthetic construct; identical to SEQ ID NO: 34940
  source 1..80: mol_type = other DNA

SEQ ID NO: 69063 - DNA, 80 bp, synthetic construct; identical to SEQ ID NO: 12625
  source 1..80: mol_type = other DNA

SEQ ID NO: 69064 - DNA, 80 bp, synthetic construct; identical to SEQ ID NO: 34942
  source 1..80: mol_type = other DNA

SEQ ID NO: 69065 - DNA, 80 bp, synthetic construct; identical to SEQ ID NO: 34943
  source 1..80: mol_type = other DNA

SEQ ID NO: 69066 - DNA, 80 bp, synthetic construct; identical to SEQ ID NO: 34944
  source 1..80: mol_type = other DNA

SEQ ID NO: 69067 - DNA, 80 bp, synthetic construct; identical to SEQ ID NO: 12626
  source 1..80: mol_type = other DNA

SEQ ID NO: 69068 - DNA, 80 bp, synthetic construct; identical to SEQ ID NO: 34946
  source 1..80: mol_type = other DNA

SEQ ID NO: 69069 - DNA, 80 bp, synthetic construct; identical to SEQ ID NO: 34947
  source 1..80: mol_type = other DNA

SEQ ID NO: 69070 - DNA, 80 bp, synthetic construct; identical to SEQ ID NO: 34948
  source 1..80: mol_type = other DNA

SEQ ID NO: 69071 - DNA, 80 bp, synthetic construct; identical to SEQ ID NO: 12627
  source 1..80: mol_type = other DNA

SEQ ID NO: 69072 - DNA, 80 bp, synthetic construct; identical to SEQ ID NO: 34950
  source 1..80: mol_type = other DNA

SEQ ID NO: 69073 - DNA, 80 bp, synthetic construct; identical to SEQ ID NO: 34951
  source 1..80: mol_type = other DNA

SEQ ID NO: 69074 - DNA, 80 bp, synthetic construct; identical to SEQ ID NO: 34952
  source 1..80: mol_type = other DNA

SEQ ID NO: 69075 - DNA, 80 bp, synthetic construct; identical to SEQ ID NO: 12628
  source 1..80: mol_type = other DNA

SEQ ID NO: 69076 - DNA, 80 bp, synthetic construct; identical to SEQ ID NO: 34954
  source 1..80: mol_type = other DNA

SEQ ID NO: 69077 - DNA, 80 bp, synthetic construct; identical to SEQ ID NO: 34955
  source 1..80: mol_type = other DNA

SEQ ID NO: 69078 - DNA, 80 bp, synthetic construct; identical to SEQ ID NO: 34956
  source 1..80: mol_type = other DNA

SEQ ID NO: 69079 - DNA, 80 bp, synthetic construct; identical to SEQ ID NO: 12629
  source 1..80: mol_type = other DNA

SEQ ID NO: 69080 - DNA, 80 bp, synthetic construct; identical to SEQ ID NO: 34958
  source 1..80: mol_type = other DNA

SEQ ID NO: 69081 - DNA, 80 bp, synthetic construct; identical to SEQ ID NO: 34959
  source 1..80: mol_type = other DNA

SEQ ID NO: 69082 - DNA, 80 bp, synthetic construct; identical to SEQ ID NO: 34960
  source 1..80: mol_type = other DNA

SEQ ID NO: 69083 - DNA, 80 bp, synthetic construct; identical to SEQ ID NO: 12630
  source 1..80: mol_type = other DNA

SEQ ID NO: 69084 - DNA, 80 bp, synthetic construct; identical to SEQ ID NO: 34962
  source 1..80: mol_type = other DNA

SEQ ID NO: 69085 - DNA, 80 bp, synthetic construct; identical to SEQ ID NO: 34964
  source 1..80: mol_type = other DNA

SEQ ID NO: 69086 - DNA, 80 bp, synthetic construct; identical to SEQ ID NO: 12631
  source 1..80: mol_type = other DNA

SEQ ID NO: 69087 - DNA, 80 bp, synthetic construct; identical to SEQ ID NO: 34966
  source 1..80: mol_type = other DNA

SEQ ID NO: 69088 - DNA, 80 bp, synthetic construct; identical to SEQ ID NO: 34968
  source 1..80: mol_type = other DNA

SEQ ID NO: 69089 - DNA, 80 bp, synthetic construct; identical to SEQ ID NO: 34970
  source 1..80: mol_type = other DNA

SEQ ID NO: 69090 - DNA, 80 bp, synthetic construct; identical to SEQ ID NO: 34972
  source 1..80: mol_type = other DNA

SEQ ID NO: 69091 - DNA, 80 bp, synthetic construct; identical to SEQ ID NO: 12633
  source 1..80: mol_type = other DNA

SEQ ID NO: 69092 - DNA, 80 bp, synthetic construct; identical to SEQ ID NO: 34974
  source 1..80: mol_type = other DNA

SEQ ID NO: 69093 - DNA, 80 bp, synthetic construct; identical to SEQ ID NO: 34976
  source 1..80: mol_type = other DNA

SEQ ID NO: 69094 - DNA, 80 bp, synthetic construct; identical to SEQ ID NO: 34977
  source 1..80: mol_type = other DNA

SEQ ID NO: 69095 - DNA, 80 bp, synthetic construct; identical to SEQ ID NO: 12634
  source 1..80: mol_type = other DNA

SEQ ID NO: 69096 - DNA, 80 bp, synthetic construct; identical to SEQ ID NO: 34979
  source 1..80: mol_type = other DNA

SEQ ID NO: 69097 - DNA, 80 bp, synthetic construct; identical to SEQ ID NO: 34980
  source 1..80: mol_type = other DNA

SEQ ID NO: 69098 - DNA, 80 bp, synthetic construct; identical to SEQ ID NO: 34981
  source 1..80: mol_type = other DNA

SEQ ID NO: 69099 - DNA, 80 bp, synthetic construct; identical to SEQ ID NO: 12635
  source 1..80: mol_type = other DNA

SEQ ID NO: 69100 - DNA, 80 bp, synthetic construct; identical to SEQ ID NO: 34983
  source 1..80: mol_type = other DNA

SEQ ID NO: 69101 - DNA, 80 bp, synthetic construct; identical to SEQ ID NO: 34984
  source 1..80: mol_type = other DNA

SEQ ID NO: 69102 - DNA, 80 bp, synthetic construct; identical to SEQ ID NO: 34985
  source 1..80: mol_type = other DNA

SEQ ID NO: 69103 - DNA, 80 bp, synthetic construct; identical to SEQ ID NO: 12636
  source 1..80: mol_type = other DNA

SEQ ID NO: 69104 - DNA, 80 bp, synthetic construct; identical to SEQ ID NO: 34987
  source 1..80: mol_type = other DNA

SEQ ID NO: 69105 - DNA, 80 bp, synthetic construct; identical to SEQ ID NO: 34988
  source 1..80: mol_type = other DNA

SEQ ID NO: 69106 - DNA, 80 bp, synthetic construct; identical to SEQ ID NO: 12637
  source 1..80: mol_type = other DNA

SEQ ID NO: 69107 - DNA, 80 bp, synthetic construct; identical to SEQ ID NO: 34990
  source 1..80: mol_type = other DNA

SEQ ID NO: 69108 - DNA, 80 bp, synthetic construct; identical to SEQ ID NO: 34991
  source 1..80: mol_type = other DNA

SEQ ID NO: 69109 - DNA, 80 bp, synthetic construct; identical to SEQ ID NO: 34992
  source 1..80: mol_type = other DNA

SEQ ID NO: 69110 - DNA, 80 bp, synthetic construct; identical to SEQ ID NO: 12638
  source 1..80: mol_type = other DNA

SEQ ID NO: 69111 - DNA, 80 bp, synthetic construct; identical to SEQ ID NO: 34994
  source 1..80: mol_type = other DNA

SEQ ID NO: 69112 - DNA, 80 bp, synthetic construct; identical to SEQ ID NO: 34995
  source 1..80: mol_type = other DNA

SEQ ID NO: 69113 - DNA, 80 bp, synthetic construct; identical to SEQ ID NO: 34996
  source 1..80: mol_type = other DNA

SEQ ID NO: 69114 - DNA, 80 bp, synthetic construct; identical to SEQ ID NO: 12639
  source 1..80: mol_type = other DNA

SEQ ID NO: 69115 - DNA, 80 bp, synthetic construct; identical to SEQ ID NO: 34998
  source 1..80: mol_type = other DNA

SEQ ID NO: 69116 - DNA, 80 bp, synthetic construct; identical to SEQ ID NO: 34999
  source 1..80: mol_type = other DNA

SEQ ID NO: 69117 - DNA, 80 bp, synthetic construct; identical to SEQ ID NO: 35000
  source 1..80: mol_type = other DNA

SEQ ID NO: 69118 - DNA, 80 bp, synthetic construct; identical to SEQ ID NO: 12640
  source 1..80: mol_type = other DNA

SEQ ID NO: 69119 - DNA, 80 bp, synthetic construct; identical to SEQ ID NO: 35002
  source 1..80: mol_type = other DNA

SEQ ID NO: 69120 - DNA, 80 bp, synthetic construct; identical to SEQ ID NO: 35003
  source 1..80: mol_type = other DNA

SEQ ID NO: 69121 - DNA, 80 bp, synthetic construct; identical to SEQ ID NO: 35004
  source 1..80: mol_type = other DNA

SEQ ID NO: 69122 - DNA, 80 bp, synthetic construct; identical to SEQ ID NO: 12641
  source 1..80: mol_type = other DNA

SEQ ID NO: 69123 - DNA, 80 bp, synthetic construct; identical to SEQ ID NO: 35006
  source 1..80: mol_type = other DNA

SEQ ID NO: 69124 - DNA, 80 bp, synthetic construct; identical to SEQ ID NO: 35007
  source 1..80: mol_type = other DNA

SEQ ID NO: 69125 - DNA, 80 bp, synthetic construct; identical to SEQ ID NO: 35008
  source 1..80: mol_type = other DNA

SEQ ID NO: 69126 - DNA, 80 bp, synthetic construct; identical to SEQ ID NO: 12642
  source 1..80: mol_type = other DNA

SEQ ID NO: 69127 - DNA, 80 bp, synthetic construct; identical to SEQ ID NO: 35010
  source 1..80: mol_type = other DNA

SEQ ID NO: 69128 - DNA, 80 bp, synthetic construct; identical to SEQ ID NO: 35011
  source 1..80: mol_type = other DNA

SEQ ID NO: 69129 - DNA, 80 bp, synthetic construct; identical to SEQ ID NO: 12643
  source 1..80: mol_type = other DNA

SEQ ID NO: 69130 - DNA, 80 bp, synthetic construct; identical to SEQ ID NO: 35013
  source 1..80: mol_type = other DNA

SEQ ID NO: 69131 - DNA, 80 bp, synthetic construct; identical to SEQ ID NO: 35015
  source 1..80: mol_type = other DNA

SEQ ID NO: 69132 - DNA, 80 bp, synthetic construct; identical to SEQ ID NO: 12644
  source 1..80: mol_type = other DNA

SEQ ID NO: 69133 - DNA, 80 bp, synthetic construct; identical to SEQ ID NO: 35017
  source 1..80: mol_type = other DNA

SEQ ID NO: 69134 - DNA, 80 bp, synthetic construct; identical to SEQ ID NO: 35018
  source 1..80: mol_type = other DNA

SEQ ID NO: 69135 - DNA, 80 bp, synthetic construct; identical to SEQ ID NO: 35019
  source 1..80: mol_type = other DNA

SEQ ID NO: 69136 - DNA, 80 bp, synthetic construct; identical to SEQ ID NO: 12645
  source 1..80: mol_type = other DNA

SEQ ID NO: 69137 - DNA, 80 bp, synthetic construct; identical to SEQ ID NO: 35021
  source 1..80: mol_type = other DNA

SEQ ID NO: 69138 - DNA, 80 bp, synthetic construct; identical to SEQ ID NO: 35022
  source 1..80: mol_type = other DNA

SEQ ID NO: 69139 - DNA, 80 bp, synthetic construct; identical to SEQ ID NO: 35023
  source 1..80: mol_type = other DNA

SEQ ID NO: 69140 - DNA, 80 bp, synthetic construct; identical to SEQ ID NO: 12646
  source 1..80: mol_type = other DNA

SEQ ID NO: 69141 - DNA, 80 bp, synthetic construct; identical to SEQ ID NO: 35025
  source 1..80: mol_type = other DNA

SEQ ID NO: 69142 - DNA, 80 bp, synthetic construct; identical to SEQ ID NO: 35026
  source 1..80: mol_type = other DNA

SEQ ID NO: 69143 - DNA, 80 bp, synthetic construct; identical to SEQ ID NO: 35027
  source 1..80: mol_type = other DNA

SEQ ID NO: 69144 - DNA, 80 bp, synthetic construct; identical to SEQ ID NO: 12647
  source 1..80: mol_type = other DNA

SEQ ID NO: 69145 - DNA, 80 bp, synthetic construct; identical to SEQ ID NO: 35029
  source 1..80: mol_type = other DNA

SEQ ID NO: 69146 - DNA, 80 bp, synthetic construct; identical to SEQ ID NO: 35030
  source 1..80: mol_type = other DNA

SEQ ID NO: 69147 - DNA, 80 bp, synthetic construct; identical to SEQ ID NO: 35032
  source 1..80: mol_type = other DNA

SEQ ID NO: 69148 - DNA, 80 bp, synthetic construct; identical to SEQ ID NO: 35033
  source 1..80: mol_type = other DNA

SEQ ID NO: 69149 - DNA, 80 bp, synthetic construct; identical to SEQ ID NO: 12648
  source 1..80: mol_type = other DNA

SEQ ID NO: 69150 - DNA, 80 bp, synthetic construct; identical to SEQ ID NO: 35035
  source 1..80: mol_type = other DNA

SEQ ID NO: 69151 - DNA, 80 bp, synthetic construct; identical to SEQ ID NO: 35036
  source 1..80: mol_type = other DNA

SEQ ID NO: 69152 - DNA, 80 bp, synthetic construct; identical to SEQ ID NO: 35037
  source 1..80: mol_type = other DNA

SEQ ID NO: 69153 - DNA, 80 bp, synthetic construct; identical to SEQ ID NO: 12649
  source 1..80: mol_type = other DNA

SEQ ID NO: 69154 - DNA, 80 bp, synthetic construct; identical to SEQ ID NO: 35039
  source 1..80: mol_type = other DNA

SEQ ID NO: 69155 - DNA, 80 bp, synthetic construct; identical to SEQ ID NO: 35040
  source 1..80: mol_type = other DNA

SEQ ID NO: 69156 - DNA, 80 bp, synthetic construct; identical to SEQ ID NO: 12650
  source 1..80: mol_type = other DNA

SEQ ID NO: 69157 - DNA, 80 bp, synthetic construct; identical to SEQ ID NO: 35042
  source 1..80: mol_type = other DNA

SEQ ID NO: 69158 - DNA, 80 bp, synthetic construct; identical to SEQ ID NO: 35043
  source 1..80: mol_type = other DNA

SEQ ID NO: 69159 - DNA, 80 bp, synthetic construct; identical to SEQ ID NO: 35044
  source 1..80: mol_type = other DNA

SEQ ID NO: 69160 - DNA, 80 bp, synthetic construct; identical to SEQ ID NO: 35045
  source 1..80: mol_type = other DNA

SEQ ID NO: 69161 - DNA, 80 bp, synthetic construct; identical to SEQ ID NO: 12651
  source 1..80: mol_type = other DNA

SEQ ID NO: 69162 - DNA, 80 bp, synthetic construct; identical to SEQ ID NO: 35047
  source 1..80: mol_type = other DNA

SEQ ID NO: 69163 - DNA, 80 bp, synthetic construct; identical to SEQ ID NO: 35048
  source 1..80: mol_type = other DNA

SEQ ID NO: 69164 - DNA, 80 bp, synthetic construct; identical to SEQ ID NO: 35049
  source 1..80: mol_type = other DNA

SEQ ID NO: 69165 - DNA, 80 bp, synthetic construct; identical to SEQ ID NO: 12652
  source 1..80: mol_type = other DNA

SEQ ID NO: 69166 - DNA, 80 bp, synthetic construct; identical to SEQ ID NO: 35051
  source 1..80: mol_type = other DNA

SEQ ID NO: 69167 - DNA, 80 bp, synthetic construct; identical to SEQ ID NO: 35052
  source 1..80: mol_type = other DNA

SEQ ID NO: 69168 - DNA, 80 bp, synthetic construct; identical to SEQ ID NO: 12653
  source 1..80: mol_type = other DNA

SEQ ID NO: 69169 - DNA, 80 bp, synthetic construct; identical to SEQ ID NO: 35054
  source 1..80: mol_type = other DNA

SEQ ID NO: 69170 - DNA, 80 bp, synthetic construct; identical to SEQ ID NO: 35056
  source 1..80: mol_type = other DNA

SEQ ID NO: 69171 - DNA, 80 bp, synthetic construct; identical to SEQ ID NO: 35057
  source 1..80: mol_type = other DNA

SEQ ID NO: 69172 - DNA, 80 bp, synthetic construct; identical to SEQ ID NO: 12654
  source 1..80: mol_type = other DNA

SEQ ID NO: 69173 - DNA, 80 bp, synthetic construct; identical to SEQ ID NO: 35059
  source 1..80: mol_type = other DNA

SEQ ID NO: 69174 - DNA, 80 bp, synthetic construct; identical to SEQ ID NO: 35060
  source 1..80: mol_type = other DNA

SEQ ID NO: 69175 - DNA, 80 bp, synthetic construct; identical to SEQ ID NO: 35061
  source 1..80: mol_type = other DNA

SEQ ID NO: 69176 - DNA, 80 bp, synthetic construct; identical to SEQ ID NO: 12655
  source 1..80: mol_type = other DNA

SEQ ID NO: 69177 - DNA, 80 bp, synthetic construct; identical to SEQ ID NO: 35063
  source 1..80: mol_type = other DNA

SEQ ID NO: 69178 - DNA, 80 bp, synthetic construct; identical to SEQ ID NO: 35064
  source 1..80: mol_type = other DNA

SEQ ID NO: 69179 - DNA, 80 bp, synthetic construct; identical to SEQ ID NO: 12656
  source 1..80: mol_type = other DNA

SEQ ID NO: 69180 - DNA, 80 bp, synthetic construct; identical to SEQ ID NO: 35066
  source 1..80: mol_type = other DNA

SEQ ID NO: 69181 - DNA, 80 bp, synthetic construct; identical to SEQ ID NO: 35067
  source 1..80: mol_type = other DNA

SEQ ID NO: 69182 - DNA, 80 bp, synthetic construct; identical to SEQ ID NO: 35068
  source 1..80: mol_type = other DNA

SEQ ID NO: 69183 - DNA, 80 bp, synthetic construct; identical to SEQ ID NO: 35069
  source 1..80: mol_type = other DNA

SEQ ID NO: 69184 - DNA, 80 bp, synthetic construct; identical to SEQ ID NO: 12657
  source 1..80: mol_type = other DNA

SEQ ID NO: 69185 - DNA, 80 bp, synthetic construct; identical to SEQ ID NO: 35071
  source 1..80: mol_type = other DNA

SEQ ID NO: 69186 - DNA, 80 bp, synthetic construct; identical to SEQ ID NO: 35072
  source 1..80: mol_type = other DNA

SEQ ID NO: 69187 - DNA, 80 bp, synthetic construct; identical to SEQ ID NO: 35073
  source 1..80: mol_type = other DNA

SEQ ID NO: 69188 - DNA, 80 bp, synthetic construct; identical to SEQ ID NO: 12658
  source 1..80: mol_type = other DNA

SEQ ID NO: 69189 - DNA, 80 bp, synthetic construct; identical to SEQ ID NO: 35075
  source 1..80: mol_type = other DNA

SEQ ID NO: 69190 - DNA, 80 bp, synthetic construct; identical to SEQ ID NO: 35076
  source 1..80: mol_type = other DNA

SEQ ID NO: 69191 - DNA, 80 bp, synthetic construct; identical to SEQ ID NO: 35077
  source 1..80: mol_type = other DNA

SEQ ID NO: 69192 - DNA, 80 bp, synthetic construct; identical to SEQ ID NO: 12659
  source 1..80: mol_type = other DNA

SEQ ID NO: 69193 - DNA, 80 bp, synthetic construct; identical to SEQ ID NO: 35079
  source 1..80: mol_type = other DNA

SEQ ID NO: 69194 - DNA, 80 bp, synthetic construct; identical to SEQ ID NO: 35080
  source 1..80: mol_type = other DNA

SEQ ID NO: 69195 - DNA, 80 bp, synthetic construct; identical to SEQ ID NO: 35081
  source 1..80: mol_type = other DNA

SEQ ID NO: 69196 - DNA, 80 bp, synthetic construct; identical to SEQ ID NO: 12660
  source 1..80: mol_type = other DNA

SEQ ID NO: 69197 - DNA, 80 bp, synthetic construct; identical to SEQ ID NO: 35083
  source 1..80: mol_type = other DNA

SEQ ID NO: 69198 - DNA, 80 bp, synthetic construct; identical to SEQ ID NO: 35084
  source 1..80: mol_type = other DNA

SEQ ID NO: 69199 - DNA, 80 bp, synthetic construct; identical to SEQ ID NO: 35085
  source 1..80: mol_type = other DNA

SEQ ID NO: 69200 - DNA, 80 bp, synthetic construct; identical to SEQ ID NO: 35086
  source 1..80: mol_type = other DNA

SEQ ID NO: 69201 - DNA, 80 bp, synthetic construct; identical to SEQ ID NO: 12661
  source 1..80: mol_type = other DNA

SEQ ID NO: 69202 - DNA, 80 bp, synthetic construct; identical to SEQ ID NO: 35088
  source 1..80: mol_type = other DNA

SEQ ID NO: 69203 - DNA, 80 bp, synthetic construct; identical to SEQ ID NO: 35089
  source 1..80: mol_type = other DNA

SEQ ID NO: 69204 - DNA, 80 bp, synthetic construct; identical to SEQ ID NO: 35090
  source 1..80: mol_type = other DNA

SEQ ID NO: 69205 - DNA, 80 bp, synthetic construct; identical to SEQ ID NO: 12662
  source 1..80: mol_type = other DNA

SEQ ID NO: 69206 - DNA, 80 bp, synthetic construct; identical to SEQ ID NO: 35092
  source 1..80: mol_type = other DNA

SEQ ID NO: 69207 - DNA, 80 bp, synthetic construct; identical to SEQ ID NO: 35093
  source 1..80: mol_type = other DNA

SEQ ID NO: 69208 - DNA, 80 bp, synthetic construct; identical to SEQ ID NO: 12663
  source 1..80: mol_type = other DNA

SEQ ID NO: 69209 - DNA, 80 bp, synthetic construct; identical to SEQ ID NO: 35095
  source 1..80: mol_type = other DNA

SEQ ID NO: 69210 - DNA, 80 bp, synthetic construct; identical to SEQ ID NO: 35096
  source 1..80: mol_type = other DNA

SEQ ID NO: 69211 - DNA, 80 bp, synthetic construct; identical to SEQ ID NO: 35097
  source 1..80: mol_type = other DNA

SEQ ID NO: 69212 - DNA, 80 bp, synthetic construct; identical to SEQ ID NO: 12664
  source 1..80: mol_type = other DNA

SEQ ID NO: 69213 - DNA, 80 bp, synthetic construct; identical to SEQ ID NO: 35099
  source 1..80: mol_type = other DNA

SEQ ID NO: 69214 - DNA, 80 bp, synthetic construct; identical to SEQ ID NO: 35100
  source 1..80: mol_type = other DNA

SEQ ID NO: 69215 - DNA, 80 bp, synthetic construct; identical to SEQ ID NO: 35101
  source 1..80: mol_type = other DNA

SEQ ID NO: 69216 - DNA, 80 bp, synthetic construct; identical to SEQ ID NO: 35102
  source 1..80: mol_type = other DNA

SEQ ID NO: 69217 - DNA, 80 bp, synthetic construct; identical to SEQ ID NO: 12665
  source 1..80: mol_type = other DNA

SEQ ID NO: 69218 - DNA, 80 bp, synthetic construct; identical to SEQ ID NO: 35104
  source 1..80: mol_type = other DNA

SEQ ID NO: 69219 - DNA, 80 bp, synthetic construct; identical to SEQ ID NO: 35105
  source 1..80: mol_type = other DNA

SEQ ID NO: 69220 - DNA, 80 bp, synthetic construct; identical to SEQ ID NO: 12666
  source 1..80: mol_type = other DNA

SEQ ID NO: 69221 - DNA, 80 bp, synthetic construct; identical to SEQ ID NO: 35107
  source 1..80: mol_type = other DNA

SEQ ID NO: 69222 - DNA, 80 bp, synthetic construct; identical to SEQ ID NO: 35108
  source 1..80: mol_type = other DNA

SEQ ID NO: 69223 - DNA, 80 bp, synthetic construct; identical to SEQ ID NO: 35109
  source 1..80: mol_type = other DNA

SEQ ID NO: 69224 - DNA, 80 bp, synthetic construct; identical to SEQ ID NO: 12667
  source 1..80: mol_type = other DNA

SEQ ID NO: 69225 - DNA, 80 bp, synthetic construct; identical to SEQ ID NO: 35111
  source 1..80: mol_type = other DNA

SEQ ID NO: 69226 - DNA, 80 bp, synthetic construct; identical to SEQ ID NO: 35112
  source 1..80: mol_type = other DNA

SEQ ID NO: 69227 - DNA, 80 bp, synthetic construct; identical to SEQ ID NO: 35113
  source 1..80: mol_type = other DNA

SEQ ID NO: 69228 - DNA, 80 bp, synthetic construct; identical to SEQ ID NO: 12668
  source 1..80: mol_type = other DNA

SEQ ID NO: 69229 - DNA, 80 bp, synthetic construct; identical to SEQ ID NO: 35116
  source 1..80: mol_type = other DNA

SEQ ID NO: 69230 - DNA, 80 bp, synthetic construct; identical to SEQ ID NO: 35117
  source 1..80: mol_type = other DNA

SEQ ID NO: 69231 - DNA, 80 bp, synthetic construct; identical to SEQ ID NO: 35118
  source 1..80: mol_type = other DNA

SEQ ID NO: 69232 - DNA, 80 bp, synthetic construct; identical to SEQ ID NO: 12669
  source 1..80: mol_type = other DNA

SEQ ID NO: 69233 - DNA, 80 bp, synthetic construct; identical to SEQ ID NO: 35120
  source 1..80: mol_type = other DNA

SEQ ID NO: 69234 - DNA, 80 bp, synthetic construct; identical to SEQ ID NO: 35121
  source 1..80: mol_type = other DNA

SEQ ID NO: 69235 - DNA, 80 bp, synthetic construct; identical to SEQ ID NO: 35122
  source 1..80: mol_type = other DNA

SEQ ID NO: 69236 - DNA, 80 bp, synthetic construct; identical to SEQ ID NO: 35123
  source 1..80: mol_type = other DNA

SEQ ID NO: 69237 - DNA, 80 bp, synthetic construct; identical to SEQ ID NO: 12670
  source 1..80: mol_type = other DNA

SEQ ID NO: 69238 - DNA, 80 bp, synthetic construct; identical to SEQ ID NO: 35125
  source 1..80: mol_type = other DNA

SEQ ID NO: 69239 - DNA, 80 bp, synthetic construct; identical to SEQ ID NO: 35126
  source 1..80: mol_type = other DNA

SEQ ID NO: 69240 - DNA, 80 bp, synthetic construct; identical to SEQ ID NO: 12671
  source 1..80: mol_type = other DNA

SEQ ID NO: 69241 - DNA, 80 bp, synthetic construct; identical to SEQ ID NO: 35128
  source 1..80: mol_type = other DNA

SEQ ID NO: 69242 - DNA, 80 bp, synthetic construct; identical to SEQ ID NO: 35129
  source 1..80: mol_type = other DNA

SEQ ID NO: 69243 - DNA, 80 bp, synthetic construct; identical to SEQ ID NO: 35130
  source 1..80: mol_type = other DNA

SEQ ID NO: 69244 - DNA, 80 bp, synthetic construct; identical to SEQ ID NO: 35131
  source 1..80: mol_type = other DNA

SEQ ID NO: 69245 - DNA, 80 bp, synthetic construct; identical to SEQ ID NO: 12672
  source 1..80: mol_type = other DNA

SEQ ID NO: 69246 - DNA, 80 bp, synthetic construct; identical to SEQ ID NO: 35133
  source 1..80: mol_type = other DNA

SEQ ID NO: 69247 - DNA, 80 bp, synthetic construct; identical to SEQ ID NO: 35134
  source 1..80: mol_type = other DNA

SEQ ID NO: 69248 - DNA, 80 bp, synthetic construct; identical to SEQ ID NO: 35135
  source 1..80: mol_type = other DNA

SEQ ID NO: 69249 - DNA, 80 bp, synthetic construct; identical to SEQ ID NO: 12673
  source 1..80: mol_type = other DNA

SEQ ID NO: 69250 - DNA, 80 bp, synthetic construct; identical to SEQ ID NO: 35137
  source 1..80: mol_type = other DNA

SEQ ID NO: 69251 - DNA, 80 bp, synthetic construct; identical to SEQ ID NO: 35138
  source 1..80: mol_type = other DNA

SEQ ID NO: 69252 - DNA, 80 bp, synthetic construct; identical to SEQ ID NO: 35139
  source 1..80: mol_type = other DNA

SEQ ID NO: 69253 - DNA, 80 bp, synthetic construct; identical to SEQ ID NO: 12674
  source 1..80: mol_type = other DNA

SEQ ID NO: 69254 - DNA, 80 bp, synthetic construct; identical to SEQ ID NO: 35141
  source 1..80: mol_type = other DNA

SEQ ID NO: 69255 - DNA, 80 bp, synthetic construct; identical to SEQ ID NO: 35142
  source 1..80: mol_type = other DNA

SEQ ID NO: 69256 - DNA, 80 bp, synthetic construct; identical to SEQ ID NO: 35143
  source 1..80: mol_type = other DNA

SEQ ID NO: 69257 - DNA, 80 bp, synthetic construct; identical to SEQ ID NO: 35144
  source 1..80: mol_type = other DNA

SEQ ID NO: 69258 - DNA, 80 bp, synthetic construct; identical to SEQ ID NO: 12675
  source 1..80: mol_type = other DNA

SEQ ID NO: 69259 - DNA, 80 bp, synthetic construct; identical to SEQ ID NO: 35146
  source 1..80: mol_type = other DNA

SEQ ID NO: 69260 - DNA, 80 bp, synthetic construct; identical to SEQ ID NO: 35147
  source 1..80: mol_type = other DNA

SEQ ID NO: 69261 - DNA, 80 bp, synthetic construct; identical to SEQ ID NO: 12676
  source 1..80: mol_type = other DNA

SEQ ID NO: 69262 - DNA, 80 bp, synthetic construct; identical to SEQ ID NO: 35149
  source 1..80: mol_type = other DNA

SEQ ID NO: 69263 - DNA, 80 bp, synthetic construct; identical to SEQ ID NO: 35150
  source 1..80: mol_type = other DNA

SEQ ID NO: 69264 - DNA, 80 bp, synthetic construct; identical to SEQ ID NO: 35151
  source 1..80: mol_type = other DNA

SEQ ID NO: 69265 - DNA, 80 bp, synthetic construct; identical to SEQ ID NO: 12677
  source 1..80: mol_type = other DNA

SEQ ID NO: 69266 - DNA, 80 bp, synthetic construct; identical to SEQ ID NO: 35153
  source 1..80: mol_type = other DNA

SEQ ID NO: 69267 - DNA, 80 bp, synthetic construct; identical to SEQ ID NO: 35155
  source 1..80: mol_type = other DNA

SEQ ID NO: 69268 - DNA, 80 bp, synthetic construct; identical to SEQ ID NO: 12678
  source 1..80: mol_type = other DNA

SEQ ID NO: 69269 - DNA, 80 bp, synthetic construct; identical to SEQ ID NO: 35157
  source 1..80: mol_type = other DNA

SEQ ID NO: 69270 - DNA, 80 bp, synthetic construct; identical to SEQ ID NO: 35159
  source 1..80: mol_type = other DNA

SEQ ID NO: 69271 - DNA, 80 bp, synthetic construct; identical to SEQ ID NO: 12679
  source 1..80: mol_type = other DNA

SEQ ID NO: 69272 - DNA, 80 bp, synthetic construct; identical to SEQ ID NO: 35162
  source 1..80: mol_type = other DNA

SEQ ID NO: 69273 - DNA, 80 bp, synthetic construct; identical to SEQ ID NO: 35163
  source 1..80: mol_type = other DNA

SEQ ID NO: 69274 - DNA, 80 bp, synthetic construct; identical to SEQ ID NO: 12680
  source 1..80: mol_type = other DNA

SEQ ID NO: 69275 - DNA, 80 bp, synthetic construct; identical to SEQ ID NO: 35166
  source 1..80: mol_type = other DNA

SEQ ID NO: 69276 - DNA, 80 bp, synthetic construct; identical to SEQ ID NO: 35167
  source 1..80: mol_type = other DNA

SEQ ID NO: 69277 - DNA, 80 bp, synthetic construct; identical to SEQ ID NO: 12681
  source 1..80: mol_type = other DNA

SEQ ID NO: 69278 - DNA, 80 bp, synthetic construct; identical to SEQ ID NO: 35169
  source 1..80: mol_type = other DNA

SEQ ID NO: 69279 - DNA, 80 bp, synthetic construct; identical to SEQ ID NO: 35170
  source 1..80: mol_type = other DNA

SEQ ID NO: 69280 - DNA, 80 bp, synthetic construct; identical to SEQ ID NO: 35171
  source 1..80: mol_type = other DNA

SEQ ID NO: 69281 - DNA, 80 bp, synthetic construct; identical to SEQ ID NO: 12682
  source 1..80: mol_type = other DNA

SEQ ID NO: 69282 - DNA, 80 bp, synthetic construct; identical to SEQ ID NO: 35173
  source 1..80: mol_type = other DNA

SEQ ID NO: 69283 - DNA, 80 bp, synthetic construct; identical to SEQ ID NO: 35174
  source 1..80: mol_type = other DNA

SEQ ID NO: 69284 - DNA, 80 bp, synthetic construct; identical to SEQ ID NO: 35175
  source 1..80: mol_type = other DNA

SEQ ID NO: 69285 - DNA, 80 bp, synthetic construct; identical to SEQ ID NO: 12683
  source 1..80: mol_type = other DNA

SEQ ID NO: 69286 - DNA, 80 bp, synthetic construct; identical to SEQ ID NO: 35177
  source 1..80: mol_type = other DNA

SEQ ID NO: 69287 - DNA, 80 bp, synthetic construct; identical to SEQ ID NO: 35178
  source 1..80: mol_type = other DNA

SEQ ID NO: 69288 - DNA, 80 bp, synthetic construct; identical to SEQ ID NO: 35179
  source 1..80: mol_type = other DNA

SEQ ID NO: 69289 - DNA, 80 bp, synthetic construct; identical to SEQ ID NO: 35180
  source 1..80: mol_type = other DNA

SEQ ID NO: 69290 - DNA, 80 bp, synthetic construct; identical to SEQ ID NO: 12684
  source 1..80: mol_type = other DNA

SEQ ID NO: 69291 - DNA, 80 bp, synthetic construct; identical to SEQ ID NO: 35182
  source 1..80: mol_type = other DNA

SEQ ID NO: 69292 - DNA, 80 bp, synthetic construct; identical to SEQ ID NO: 35183
  source 1..80: mol_type = other DNA

SEQ ID NO: 69293 - DNA, 80 bp, synthetic construct; identical to SEQ ID NO: 35184
  source 1..80: mol_type = other DNA

SEQ ID NO: 69294 - DNA, 80 bp, synthetic construct; identical to SEQ ID NO: 12685
  source 1..80: mol_type = other DNA

SEQ ID NO: 69295 - DNA, 80 bp, synthetic construct; identical to SEQ ID NO: 35186
  source 1..80: mol_type = other DNA

SEQ ID NO: 69296 - DNA, 80 bp, synthetic construct; identical to SEQ ID NO: 35187
  source 1..80: mol_type = other DNA

SEQ ID NO: 69297 - DNA, 80 bp, synthetic construct; identical to SEQ ID NO: 35188
  source 1..80: mol_type = other DNA

SEQ ID NO: 69298 - DNA, 80 bp, synthetic construct; identical to SEQ ID NO: 12686
  source 1..80: mol_type = other DNA

SEQ ID NO: 69299 - DNA, 80 bp, synthetic construct; identical to SEQ ID NO: 35191
  source 1..80: mol_type = other DNA

SEQ ID NO: 69300 - DNA, 80 bp, synthetic construct; identical to SEQ ID NO: 35192
  source 1..80: mol_type = other DNA

SEQ ID NO: 69301 - DNA, 80 bp, synthetic construct; identical to SEQ ID NO: 12687
  source 1..80: mol_type = other DNA

SEQ ID NO: 69302 - DNA, 80 bp, synthetic construct; identical to SEQ ID NO: 35194
  source 1..80: mol_type = other DNA

SEQ ID NO: 69303 - DNA, 80 bp, synthetic construct; identical to SEQ ID NO: 35195
  source 1..80: mol_type = other DNA

SEQ ID NO: 69304 - DNA, 80 bp, synthetic construct; identical to SEQ ID NO: 35196
  source 1..80: mol_type = other DNA

SEQ ID NO: 69305 - DNA, 80 bp, synthetic construct; identical to SEQ ID NO: 12688
  source 1..80: mol_type = other DNA

SEQ ID NO: 69306 - DNA, 80 bp, synthetic construct; identical to SEQ ID NO: 35198
  source 1..80: mol_type = other DNA

SEQ ID NO: 69307 - DNA, 80 bp, synthetic construct; identical to SEQ ID NO: 35199
  source 1..80: mol_type = other DNA

SEQ ID NO: 69308 - DNA, 80 bp, synthetic construct; identical to SEQ ID NO: 35200
  source 1..80: mol_type = other DNA

SEQ ID NO: 69309 - DNA, 80 bp, synthetic construct; identical to SEQ ID NO: 12689
  source 1..80: mol_type = other DNA

SEQ ID NO: 69310 - DNA, 80 bp, synthetic construct; identical to SEQ ID NO: 35203
  source 1..80: mol_type = other DNA

SEQ ID NO: 69311 - DNA, 80 bp, synthetic construct; identical to SEQ ID NO: 35204
  source 1..80: mol_type = other DNA

SEQ ID NO: 69312 - DNA, 80 bp, synthetic construct; identical to SEQ ID NO: 12690
  source 1..80: mol_type = other DNA

SEQ ID NO: 69313 - DNA, 80 bp, synthetic construct; identical to SEQ ID NO: 35206
  source 1..80: mol_type = other DNA

SEQ ID NO: 69314 - DNA, 80 bp, synthetic construct; identical to SEQ ID NO: 35207
  source 1..80: mol_type = other DNA

SEQ ID NO: 69315 - DNA, 80 bp, synthetic construct; identical to SEQ ID NO: 35208
  source 1..80: mol_type = other DNA

SEQ ID NO: 69316 - DNA, 80 bp, synthetic construct; identical to SEQ ID NO: 12691
  source 1..80: mol_type = other DNA

SEQ ID NO: 69317 - DNA, 80 bp, synthetic construct; identical to SEQ ID NO: 35210
  source 1..80: mol_type = other DNA

SEQ ID NO: 69318 - DNA, 80 bp, synthetic construct; identical to SEQ ID NO: 35211
  source 1..80: mol_type = other DNA

SEQ ID NO: 69319 - DNA, 80 bp, synthetic construct; identical to SEQ ID NO: 35212
  source 1..80: mol_type = other DNA

SEQ ID NO: 69320 - DNA, 80 bp, synthetic construct; identical to SEQ ID NO: 35213
  source 1..80: mol_type = other DNA

SEQ ID NO: 69321 - DNA, 80 bp, synthetic construct; identical to SEQ ID NO: 12692
  source 1..80: mol_type = other DNA

SEQ ID NO: 69322 - DNA, 80 bp, synthetic construct; identical to SEQ ID NO: 35215
  source 1..80: mol_type = other DNA

SEQ ID NO: 69323 - DNA, 80 bp, synthetic construct; identical to SEQ ID NO: 35216
  source 1..80: mol_type = other DNA

SEQ ID NO: 69324 - DNA, 80 bp, synthetic construct; identical to SEQ ID NO: 12693
  source 1..80: mol_type = other DNA

SEQ ID NO: 69325 - DNA, 80 bp, synthetic construct; identical to SEQ ID NO: 35218
  source 1..80: mol_type = other DNA

SEQ ID NO: 69326 - DNA, 80 bp, synthetic construct; identical to SEQ ID NO: 35219
  source 1..80: mol_type = other DNA

SEQ ID NO: 69327 - DNA, 80 bp, synthetic construct; identical to SEQ ID NO: 35220
  source 1..80: mol_type = other DNA

SEQ ID NO: 69328 - DNA, 80 bp, synthetic construct; identical to SEQ ID NO: 12694
  source 1..80: mol_type = other DNA

SEQ ID NO: 69329 - DNA, 80 bp, synthetic construct; identical to SEQ ID NO: 35222
  source 1..80: mol_type = other DNA

SEQ ID NO: 69330 - DNA, 80 bp, synthetic construct; identical to SEQ ID NO: 35223
  source 1..80: mol_type = other DNA

SEQ ID NO: 69331 - DNA, 80 bp, synthetic construct; identical to SEQ ID NO: 35224
  source 1..80: mol_type = other DNA

SEQ ID NO: 69332 - DNA, 80 bp, synthetic construct; identical to SEQ ID NO: 12695
  source 1..80: mol_type = other DNA

SEQ ID NO: 69333 - DNA, 80 bp, synthetic construct; identical to SEQ ID NO: 35226
  source 1..80: mol_type = other DNA

SEQ ID NO: 69334 - DNA, 80 bp, synthetic construct; identical to SEQ ID NO: 35227
  source 1..80: mol_type = other DNA

SEQ ID NO: 69335 - DNA, 80 bp, synthetic construct; identical to SEQ ID NO: 35228
  source 1..80: mol_type = other DNA

SEQ ID NO: 69336 - DNA, 80 bp, synthetic construct; identical to SEQ ID NO: 35229
  source 1..80: mol_type = other DNA

SEQ ID NO: 69337 - DNA, 80 bp, synthetic construct; identical to SEQ ID NO: 12696
  source 1..80: mol_type = other DNA

SEQ ID NO: 69338 - DNA, 80 bp, synthetic construct; identical to SEQ ID NO: 35231
  source 1..80: mol_type = other DNA

SEQ ID NO: 69339 - DNA, 80 bp, synthetic construct; identical to SEQ ID NO: 35232
  source 1..80: mol_type = other DNA

SEQ ID NO: 69340 - DNA, 80 bp, synthetic construct; identical to SEQ ID NO: 35233
  source 1..80: mol_type = other DNA

SEQ ID NO: 69341 - DNA, 80 bp, synthetic construct; identical to SEQ ID NO: 12697
  source 1..80: mol_type = other DNA

SEQ ID NO: 69342 - DNA, 80 bp, synthetic construct; identical to SEQ ID NO: 35235
  source 1..80: mol_type = other DNA

SEQ ID NO: 69343 - DNA, 80 bp, synthetic construct; identical to SEQ ID NO: 35236
  source 1..80: mol_type = other DNA

SEQ ID NO: 69344 - DNA, 80 bp, synthetic construct; identical to SEQ ID NO: 35237
  source 1..80: mol_type = other DNA

SEQ ID NO: 69345 - DNA, 80 bp, synthetic construct; identical to SEQ ID NO: 35238
  source 1..80: mol_type = other DNA

SEQ ID NO: 69346 - DNA, 80 bp, synthetic construct; identical to SEQ ID NO: 12698
  source 1..80: mol_type = other DNA

SEQ ID NO: 69347 - DNA, 80 bp, synthetic construct; identical to SEQ ID NO: 35240
  source 1..80: mol_type = other DNA

SEQ ID NO: 69348 - DNA, 80 bp, synthetic construct; identical to SEQ ID NO: 35241
  source 1..80: mol_type = other DNA

SEQ ID NO: 69349 - DNA, 80 bp, synthetic construct; identical to SEQ ID NO: 35243
  source 1..80: mol_type = other DNA

SEQ ID NO: 69350 - DNA, 80 bp, synthetic construct; identical to SEQ ID NO: 35245
  source 1..80: mol_type = other DNA

SEQ ID NO: 69351 - DNA, 80 bp, synthetic construct; identical to SEQ ID NO: 35246
  source 1..80: mol_type = other DNA

SEQ ID NO: 69352 - DNA, 80 bp, synthetic construct; identical to SEQ ID NO: 12700
  source 1..80: mol_type = other DNA

SEQ ID NO: 69353 - DNA, 80 bp, synthetic construct; identical to SEQ ID NO: 35248
  source 1..80: mol_type = other DNA

SEQ ID NO: 69354 - DNA, 80 bp, synthetic construct; identical to SEQ ID NO: 35249
  source 1..80: mol_type = other DNA

SEQ ID NO: 69355 - DNA, 80 bp, synthetic construct; identical to SEQ ID NO: 35250
  source 1..80: mol_type = other DNA

SEQ ID NO: 69356 - DNA, 80 bp, synthetic construct; identical to SEQ ID NO: 35252
  source 1..80: mol_type = other DNA

SEQ ID NO: 69357 - DNA, 80 bp, synthetic construct; identical to SEQ ID NO: 35253
  source 1..80: mol_type = other DNA

SEQ ID NO: 69358 - DNA, 80 bp, synthetic construct; identical to SEQ ID NO: 35254
  source 1..80: mol_type = other DNA

SEQ ID NO: 69359 - DNA, 80 bp, synthetic construct; identical to SEQ ID NO: 35255
  source 1..80: mol_type = other DNA

SEQ ID NO: 69360 - DNA, 80 bp, synthetic construct; identical to SEQ ID NO: 12702
  source 1..80: mol_type = other DNA

SEQ ID NO: 69361 - DNA, 80 bp, synthetic construct; identical to SEQ ID NO: 35257
  source 1..80: mol_type = other DNA

SEQ ID NO: 69362 - DNA, 80 bp, synthetic construct; identical to SEQ ID NO: 35258
  source 1..80: mol_type = other DNA

SEQ ID NO: 69363 - DNA, 80 bp, synthetic construct; identical to SEQ ID NO: 12703
  source 1..80: mol_type = other DNA

SEQ ID NO: 69364 - DNA, 80 bp, synthetic construct; identical to SEQ ID NO: 35260
  source 1..80: mol_type = other DNA

SEQ ID NO: 69365 - DNA, 80 bp, synthetic construct; identical to SEQ ID NO: 35261
  source 1..80: mol_type = other DNA

SEQ ID NO: 69366 - DNA, 80 bp, synthetic construct; identical to SEQ ID NO: 35262
  source 1..80: mol_type = other DNA

SEQ ID NO: 69367 - DNA, 80 bp, synthetic construct; identical to SEQ ID NO: 12704
  source 1..80: mol_type = other DNA

SEQ ID NO: 69368 - DNA, 80 bp, synthetic construct; identical to SEQ ID NO: 35264
  source 1..80: mol_type = other DNA

SEQ ID NO: 69369 - DNA, 80 bp, synthetic construct; identical to SEQ ID NO: 35265
  source 1..80: mol_type = other DNA

SEQ ID NO: 69370 - DNA, 80 bp, synthetic construct; identical to SEQ ID NO: 35266
  source 1..80: mol_type = other DNA

SEQ ID NO: 69371 - DNA, 80 bp, synthetic construct; identical to SEQ ID NO: 35267
  source 1..80: mol_type = other DNA

SEQ ID NO: 69372 - DNA, 80 bp, synthetic construct; identical to SEQ ID NO: 12705
  source 1..80: mol_type = other DNA

SEQ ID NO: 69373 - DNA, 80 bp, synthetic construct; identical to SEQ ID NO: 35269
  source 1..80: mol_type = other DNA

SEQ ID NO: 69374 - DNA, 80 bp, synthetic construct; identical to SEQ ID NO: 35270
  source 1..80: mol_type = other DNA

SEQ ID NO: 69375 - DNA, 80 bp, synthetic construct; identical to SEQ ID NO: 12706
  source 1..80: mol_type = other DNA

SEQ ID NO: 69376 - DNA, 80 bp, synthetic construct; identical to SEQ ID NO: 35272
  source 1..80: mol_type = other DNA

SEQ ID NO: 69377 - DNA, 80 bp, synthetic construct; identical to SEQ ID NO: 35273
  source 1..80: mol_type = other DNA

SEQ ID NO: 69378 - DNA, 80 bp, synthetic construct; identical to SEQ ID NO: 35274
  source 1..80: mol_type = other DNA

SEQ ID NO: 69379 - DNA, 80 bp, synthetic construct; identical to SEQ ID NO: 12707
  source 1..80: mol_type = other DNA

SEQ ID NO: 69380 - DNA, 80 bp, synthetic construct; identical to SEQ ID NO: 35276
  source 1..80: mol_type = other DNA

SEQ ID NO: 69381 - DNA, 80 bp, synthetic construct; identical to SEQ ID NO: 35277
  source 1..80: mol_type = other DNA

SEQ ID NO: 69382 - DNA, 80 bp, synthetic construct; identical to SEQ ID NO: 35278
  source 1..80: mol_type = other DNA

SEQ ID NO: 69383 - DNA, 80 bp, synthetic construct; identical to SEQ ID NO: 35279
  source 1..80: mol_type = other DNA

SEQ ID NO: 69384 - DNA, 80 bp, synthetic construct; identical to SEQ ID NO: 12708
  source 1..80: mol_type = other DNA

SEQ ID NO: 69385 - DNA, 80 bp, synthetic construct; identical to SEQ ID NO: 35282
  source 1..80: mol_type = other DNA

SEQ ID NO: 69386 - DNA, 80 bp, synthetic construct; identical to SEQ ID NO: 35283
  source 1..80: mol_type = other DNA

SEQ ID NO: 69387 - DNA, 80 bp, synthetic construct; identical to SEQ ID NO: 12709
  source 1..80: mol_type = other DNA

SEQ ID NO: 69388 - DNA, 80 bp, synthetic construct; identical to SEQ ID NO: 35285
  source 1..80: mol_type = other DNA

SEQ ID NO: 69389 - DNA, 80 bp, synthetic construct; identical to SEQ ID NO: 35286
  source 1..80: mol_type = other DNA

SEQ ID NO: 69390 - DNA, 80 bp, synthetic construct; identical to SEQ ID NO: 12710
  source 1..80: mol_type = other DNA

SEQ ID NO: 69391 - DNA, 80 bp, synthetic construct; identical to SEQ ID NO: 35288
  source 1..80: mol_type = other DNA

SEQ ID NO: 69392 - DNA, 80 bp, synthetic construct; identical to SEQ ID NO: 35289
  source 1..80: mol_type = other DNA

SEQ ID NO: 69393 - DNA, 80 bp, synthetic construct; identical to SEQ ID NO: 35290
  source 1..80: mol_type = other DNA

SEQ ID NO: 69394 - DNA, 80 bp, synthetic construct; identical to SEQ ID NO: 35291
  source 1..80: mol_type = other DNA

SEQ ID NO: 69395 - DNA, 80 bp, synthetic construct; identical to SEQ ID NO: 12711
  source 1..80: mol_type = other DNA

SEQ ID NO: 69396 - DNA, 80 bp, synthetic construct; identical to SEQ ID NO: 35293
  source 1..80: mol_type = other DNA

SEQ ID NO: 69397 - DNA, 80 bp, synthetic construct; identical to SEQ ID NO: 35294
  source 1..80: mol_type = other DNA

SEQ ID NO: 69398 - DNA, 80 bp, synthetic construct; identical to SEQ ID NO: 35295
  source 1..80: mol_type = other DNA

SEQ ID NO: 69399 - DNA, 80 bp, synthetic construct; identical to SEQ ID NO: 35296
  source 1..80: mol_type = other DNA

SEQ ID NO: 69400 - DNA, 80 bp, synthetic construct; identical to SEQ ID NO: 12712
  source 1..80: mol_type = other DNA

SEQ ID NO: 69401 - DNA, 80 bp, synthetic construct; identical to SEQ ID NO: 35298
  source 1..80: mol_type = other DNA

SEQ ID NO: 69402 - DNA, 80 bp, synthetic construct; identical to SEQ ID NO: 35300
  source 1..80: mol_type = other DNA

SEQ ID NO: 69403 - DNA, 80 bp, synthetic construct; identical to SEQ ID NO: 12713
  source 1..80: mol_type = other DNA

SEQ ID NO: 69404 - DNA, 80 bp, synthetic construct; identical to SEQ ID NO: 35302
  source 1..80: mol_type = other DNA

SEQ ID NO: 69405 - DNA, 80 bp, synthetic construct; identical to SEQ ID NO: 35303
  source 1..80: mol_type = other DNA

SEQ ID NO: 69406 - DNA, 80 bp, synthetic construct; identical to SEQ ID NO: 12714
  source 1..80: mol_type = other DNA

SEQ ID NO: 69407 - DNA, 80 bp, synthetic construct; identical to SEQ ID NO: 35305
  source 1..80: mol_type = other DNA

SEQ ID NO: 69408 - DNA, 80 bp, synthetic construct; identical to SEQ ID NO: 35306
  source 1..80: mol_type = other DNA

SEQ ID NO: 69409 - DNA, 80 bp, synthetic construct; identical to SEQ ID NO: 35307
  source 1..80: mol_type = other DNA

SEQ ID NO: 69410 - DNA, 80 bp, synthetic construct; identical to SEQ ID NO: 12715
  source 1..80: mol_type = other DNA

SEQ ID NO: 69411 - DNA, 80 bp, synthetic construct; identical to SEQ ID NO: 35309
  source 1..80: mol_type = other DNA

SEQ ID NO: 69412 - DNA, 80 bp, synthetic construct; identical to SEQ ID NO: 35310
  source 1..80: mol_type = other DNA

SEQ ID NO: 69413 - DNA, 80 bp, synthetic construct; identical to SEQ ID NO: 35311
  source 1..80: mol_type = other DNA

SEQ ID NO: 69414 - DNA, 80 bp, synthetic construct; identical to SEQ ID NO: 35312
  source 1..80: mol_type = other DNA

SEQ ID NO: 69415 - DNA, 80 bp, synthetic construct; identical to SEQ ID NO: 12716
  source 1..80: mol_type = other DNA

SEQ ID NO: 69416 - DNA, 80 bp, synthetic construct; identical to SEQ ID NO: 35314
  source 1..80: mol_type = other DNA

SEQ ID NO: 69417 - DNA, 80 bp, synthetic construct; identical to SEQ ID NO: 35315
  source 1..80: mol_type = other DNA

SEQ ID NO: 69418 - DNA, 80 bp, synthetic construct; identical to SEQ ID NO: 12717
  source 1..80: mol_type = other DNA

SEQ ID NO: 69419 - DNA, 80 bp, synthetic construct; identical to SEQ ID NO: 35317
  source 1..80: mol_type = other DNA

SEQ ID NO: 69420 - DNA, 80 bp, synthetic construct; identical to SEQ ID NO: 35318
  source 1..80: mol_type = other DNA

SEQ ID NO: 69421 - DNA, 80 bp, synthetic construct; identical to SEQ ID NO: 35319
  source 1..80: mol_type = other DNA

SEQ ID NO: 69422 - DNA, 80 bp, synthetic construct; identical to SEQ ID NO: 12718
  source 1..80: mol_type = other DNA

SEQ ID NO: 69423 - DNA, 80 bp, synthetic construct; identical to SEQ ID NO: 35321
  source 1..80: mol_type = other DNA

SEQ ID NO: 69424 - DNA, 80 bp, synthetic construct; identical to SEQ ID NO: 35322
  source 1..80: mol_type = other DNA

SEQ ID NO: 69425 - DNA, 80 bp, synthetic construct; identical to SEQ ID NO: 35323
  source 1..80: mol_type = other DNA

SEQ ID NO: 69426 - DNA, 80 bp, synthetic construct; identical to SEQ ID NO: 35324
  source 1..80: mol_type = other DNA

SEQ ID NO: 69427 - DNA, 80 bp, synthetic construct; identical to SEQ ID NO: 12719
  source 1..80: mol_type = other DNA

SEQ ID NO: 69428 - DNA, 80 bp, synthetic construct; identical to SEQ ID NO: 35326
  source 1..80: mol_type = other DNA

SEQ ID NO: 69429 - DNA, 80 bp, synthetic construct; identical to SEQ ID NO: 35327
  source 1..80: mol_type = other DNA

SEQ ID NO: 69430 - DNA, 80 bp, synthetic construct; identical to SEQ ID NO: 12720
  source 1..80: mol_type = other DNA

SEQ ID NO: 69431 - DNA, 80 bp, synthetic construct; identical to SEQ ID NO: 35329
  source 1..80: mol_type = other DNA

SEQ ID NO: 69432 - DNA, 80 bp, synthetic construct; identical to SEQ ID NO: 35330
  source 1..80: mol_type = other DNA

SEQ ID NO: 69433 - DNA, 80 bp, synthetic construct; identical to SEQ ID NO: 35331
  source 1..80: mol_type = other DNA

SEQ ID NO: 69434 - DNA, 80 bp, synthetic construct; identical to SEQ ID NO: 35332
  source 1..80: mol_type = other DNA

SEQ ID NO: 69435 - DNA, 80 bp, synthetic construct; identical to SEQ ID NO: 12721
  source 1..80: mol_type = other DNA

SEQ ID NO: 69436 - DNA, 80 bp, synthetic construct; identical to SEQ ID NO: 35334
  source 1..80: mol_type = other DNA

SEQ ID NO: 69437 - DNA, 80 bp, synthetic construct; identical to SEQ ID NO: 35335
  source 1..80: mol_type = other DNA

SEQ ID NO: 69438 - DNA, 80 bp, synthetic construct; identical to SEQ ID NO: 35336
  source 1..80: mol_type = other DNA

SEQ ID NO: 69439 - DNA, 80 bp, synthetic construct; identical to SEQ ID NO: 12722
  source 1..80: mol_type = other DNA

SEQ ID NO: 69440 - DNA, 80 bp, synthetic construct; identical to SEQ ID NO: 35338
  source 1..80: mol_type = other DNA

SEQ ID NO: 69441 - DNA, 80 bp, synthetic construct; identical to SEQ ID NO: 35339
  source 1..80: mol_type = other DNA

SEQ ID NO: 69442 - DNA, 80 bp, synthetic construct; identical to SEQ ID NO: 12723
  source 1..80: mol_type = other DNA

SEQ ID NO: 69443 - DNA, 80 bp, synthetic construct; identical to SEQ ID NO: 35341
  source 1..80: mol_type = other DNA

SEQ ID NO: 69444 - DNA, 80 bp, synthetic construct; identical to SEQ ID NO: 35342
  source 1..80: mol_type = other DNA

SEQ ID NO: 69445 - DNA, 80 bp, synthetic construct; identical to SEQ ID NO: 35343
  source 1..80: mol_type = other DNA

SEQ ID NO: 69446 - DNA, 80 bp, synthetic construct; identical to SEQ ID NO: 35344
  source 1..80: mol_type = other DNA

SEQ ID NO: 69447 - DNA, 80 bp, synthetic construct; identical to SEQ ID NO: 12724
  source 1..80: mol_type = other DNA

SEQ ID NO: 69448 - DNA, 80 bp, synthetic construct; identical to SEQ ID NO: 35346
  source 1..80: mol_type = other DNA

SEQ ID NO: 69449 - DNA, 80 bp, synthetic construct; identical to SEQ ID NO: 35347
  source 1..80: mol_type = other DNA

SEQ ID NO: 69450 - DNA, 80 bp, synthetic construct; identical to SEQ ID NO: 35348
  source 1..80: mol_type = other DNA

SEQ ID NO: 69451 - DNA, 80 bp, synthetic construct; identical to SEQ ID NO: 12725
  source 1..80: mol_type = other DNA

SEQ ID NO: 69452 - DNA, 80 bp, synthetic construct; identical to SEQ ID NO: 35350
  source 1..80: mol_type = other DNA

SEQ ID NO: 69453 - DNA, 80 bp, synthetic construct; identical to SEQ ID NO: 35351
  source 1..80: mol_type = other DNA

SEQ ID NO: 69454 - DNA, 80 bp, synthetic construct; identical to SEQ ID NO: 12726
  source 1..80: mol_type = other DNA

SEQ ID NO: 69455 - DNA, 80 bp, synthetic construct; identical to SEQ ID NO: 35353
  source 1..80: mol_type = other DNA

SEQ ID NO: 69456 - DNA, 80 bp, synthetic construct; identical to SEQ ID NO: 35355
  source 1..80: mol_type = other DNA

SEQ ID NO: 69457 - DNA, 80 bp, synthetic construct; identical to SEQ ID NO: 12727
  source 1..80: mol_type = other DNA

SEQ ID NO: 69458 - DNA, 80 bp, synthetic construct; identical to SEQ ID NO: 35357
  source 1..80: mol_type = other DNA

SEQ ID NO: 69459 - DNA, 80 bp, synthetic construct; identical to SEQ ID NO: 35358
  source 1..80: mol_type = other DNA

SEQ ID NO: 69460 - DNA, 80 bp, synthetic construct; identical to SEQ ID NO: 35359
  source 1..80: mol_type = other DNA

SEQ ID NO: 69461 - DNA, 80 bp, synthetic construct; identical to SEQ ID NO: 12728
  source 1..80: mol_type = other DNA

SEQ ID NO: 69462 - DNA, 80 bp, synthetic construct; identical to SEQ ID NO: 35361
  source 1..80: mol_type = other DNA

SEQ ID NO: 69463 - DNA, 80 bp, synthetic construct; identical to SEQ ID NO: 35362
  source 1..80: mol_type = other DNA

SEQ ID NO: 69464 - DNA, 80 bp, synthetic construct; identical to SEQ ID NO: 12729
  source 1..80: mol_type = other DNA

SEQ ID NO: 69465 - DNA, 80 bp, synthetic construct; identical to SEQ ID NO: 35365
  source 1..80: mol_type = other DNA

SEQ ID NO: 69466 - DNA, 80 bp, synthetic construct; identical to SEQ ID NO: 35366
  source 1..80: mol_type = other DNA

SEQ ID NO: 69467 - DNA, 80 bp, synthetic construct; identical to SEQ ID NO: 35367
  source 1..80: mol_type = other DNA

SEQ ID NO: 69468 - DNA, 80 bp, synthetic construct; identical to SEQ ID NO: 35368
  source 1..80: mol_type = other DNA

SEQ ID NO: 69469 - DNA, 80 bp, synthetic construct; identical to SEQ ID NO: 12730
  source 1..80: mol_type = other DNA

SEQ ID NO: 69470 - DNA, 80 bp, synthetic construct; identical to SEQ ID NO: 35370
  source 1..80: mol_type = other DNA

SEQ ID NO: 69471 - DNA, 80 bp, synthetic construct; identical to SEQ ID NO: 35371
  source 1..80: mol_type = other DNA

SEQ ID NO: 69472 - DNA, 80 bp, synthetic construct; identical to SEQ ID NO: 35372
  source 1..80: mol_type = other DNA

SEQ ID NO: 69473 - DNA, 80 bp, synthetic construct; identical to SEQ ID NO: 12731
  source 1..80: mol_type = other DNA

SEQ ID NO: 69474 - DNA, 80 bp, synthetic construct; identical to SEQ ID NO: 35374
  source 1..80: mol_type = other DNA

SEQ ID NO: 69475 - DNA, 80 bp, synthetic construct; identical to SEQ ID NO: 35375
  source 1..80: mol_type = other DNA

SEQ ID NO: 69476 - DNA, 80 bp, synthetic construct; identical to SEQ ID NO: 35376
  source 1..80: mol_type = other DNA

SEQ ID NO: 69477 - DNA, 80 bp, synthetic construct; identical to SEQ ID NO: 35377
  source 1..80: mol_type = other DNA

SEQ ID NO: 69478 - DNA, 80 bp, synthetic construct; identical to SEQ ID NO: 12732
  source 1..80: mol_type = other DNA

SEQ ID NO: 69479 - DNA, 80 bp, synthetic construct; identical to SEQ ID NO: 35379
  source 1..80: mol_type = other DNA

SEQ ID NO: 69480 - DNA, 80 bp, synthetic construct; identical to SEQ ID NO: 35380
  source 1..80: mol_type = other DNA

SEQ ID NO: 69481 - DNA, 80 bp, synthetic construct; identical to SEQ ID NO: 35381
  source 1..80: mol_type = other DNA

SEQ ID NO: 69482 - DNA, 80 bp, synthetic construct; identical to SEQ ID NO: 12733
  source 1..80: mol_type = other DNA

SEQ ID NO: 69483 - DNA, 80 bp, synthetic construct; identical to SEQ ID NO: 35383
  source 1..80: mol_type = other DNA

SEQ ID NO: 69484 - DNA, 80 bp, synthetic construct; identical to SEQ ID NO: 35384
  source 1..80: mol_type = other DNA

SEQ ID NO: 69485 - DNA, 80 bp, synthetic construct; identical to SEQ ID NO: 35385
  source 1..80: mol_type = other DNA

SEQ ID NO: 69486 - DNA, 80 bp, synthetic construct; identical to SEQ ID NO: 35386
  source 1..80: mol_type = other DNA

SEQ ID NO: 69487 - DNA, 80 bp, synthetic construct; identical to SEQ ID NO: 12734
  source 1..80: mol_type = other DNA

SEQ ID NO: 69488 - DNA, 80 bp, synthetic construct; identical to SEQ ID NO: 35388
  source 1..80: mol_type = other DNA

SEQ ID NO: 69489 - DNA, 80 bp, synthetic construct; identical to SEQ ID NO: 35389
  source 1..80: mol_type = other DNA

SEQ ID NO: 69490 - DNA, 80 bp, synthetic construct; identical to SEQ ID NO: 35390
  source 1..80: mol_type = other DNA

SEQ ID NO: 69491 - DNA, 80 bp, synthetic construct; identical to SEQ ID NO: 12735
  source 1..80: mol_type = other DNA

SEQ ID NO: 69492 - DNA, 80 bp, synthetic construct; identical to SEQ ID NO: 35392
  source 1..80: mol_type = other DNA

SEQ ID NO: 69493 - DNA, 80 bp, synthetic construct; identical to SEQ ID NO: 35393
  source 1..80: mol_type = other DNA

SEQ ID NO: 69494 - DNA, 80 bp, synthetic construct; identical to SEQ ID NO: 12736
  source 1..80: mol_type = other DNA

SEQ ID NO: 69495 - DNA, 80 bp, synthetic construct; identical to SEQ ID NO: 35395
  source 1..80: mol_type = other DNA

SEQ ID NO: 69496 - DNA, 80 bp, synthetic construct; identical to SEQ ID NO: 35396
  source 1..80: mol_type = other DNA

SEQ ID NO: 69497 - DNA, 80 bp, synthetic construct; identical to SEQ ID NO: 35397
  source 1..80: mol_type = other DNA

SEQ ID NO: 69498 - DNA, 80 bp, synthetic construct; identical to SEQ ID NO: 35398
  source 1..80: mol_type = other DNA

SEQ ID NO: 69499 - DNA, 80 bp, synthetic construct; identical to SEQ ID NO: 12737
  source 1..80: mol_type = other DNA

SEQ ID NO: 69500 - DNA, 80 bp, synthetic construct; identical to SEQ ID NO: 35400
  source 1..80: mol_type = other DNA

SEQ ID NO: 69501 - DNA, 80 bp, synthetic construct; identical to SEQ ID NO: 35401
  source 1..80: mol_type = other DNA

SEQ ID NO: 69502 - DNA, 80 bp, synthetic construct; identical to SEQ ID NO: 35402
  source 1..80: mol_type = other DNA

SEQ ID NO: 69503 - DNA, 80 bp, synthetic construct; identical to SEQ ID NO: 12738
  source 1..80: mol_type = other DNA

SEQ ID NO: 69504 - DNA, 80 bp, synthetic construct; identical to SEQ ID NO: 35404
  source 1..80: mol_type = other DNA

SEQ ID NO: 69505 - DNA, 80 bp, synthetic construct; identical to SEQ ID NO: 35405
  source 1..80: mol_type = other DNA

SEQ ID NO: 69506 - DNA, 80 bp, synthetic construct; identical to SEQ ID NO: 35406
  source 1..80: mol_type = other DNA

SEQ ID NO: 69507 - DNA, 80 bp, synthetic construct; identical to SEQ ID NO: 12739
  source 1..80: mol_type = other DNA

SEQ ID NO: 69508 - DNA, 80 bp, synthetic construct; identical to SEQ ID NO: 35408
  source 1..80: mol_type = other DNA

SEQ ID NO: 69509 - DNA, 80 bp, synthetic construct; identical to SEQ ID NO: 35409
  source 1..80: mol_type = other DNA

SEQ ID NO: 69510 - DNA, 80 bp, synthetic construct; identical to SEQ ID NO: 35410
  source 1..80: mol_type = other DNA

SEQ ID NO: 69511 - DNA, 80 bp, synthetic construct; identical to SEQ ID NO: 35411
  source 1..80: mol_type = other DNA

SEQ ID NO: 69512 - DNA, 80 bp, synthetic construct; identical to SEQ ID NO: 12740
  source 1..80: mol_type = other DNA

SEQ ID NO: 69513 - DNA, 80 bp, synthetic construct; identical to SEQ ID NO: 35413
  source 1..80: mol_type = other DNA

SEQ ID NO: 69514 - DNA, 80 bp, synthetic construct; identical to SEQ ID NO: 35414
  source 1..80: mol_type = other DNA

SEQ ID NO: 69515 - DNA, 80 bp, synthetic construct; identical to SEQ ID NO: 35415
  source 1..80: mol_type = other DNA

SEQ ID NO: 69516 - DNA, 80 bp, synthetic construct; identical to SEQ ID NO: 12741
  source 1..80: mol_type = other DNA

SEQ ID NO: 69517 - DNA, 80 bp, synthetic construct; identical to SEQ ID NO: 35417
  source 1..80: mol_type = other DNA

SEQ ID NO: 69518 - DNA, 80 bp, synthetic construct; identical to SEQ ID NO: 35418
  source 1..80: mol_type = other DNA

SEQ ID NO: 69519 - DNA, 80 bp, synthetic construct; identical to SEQ ID NO: 35419
  source 1..80: mol_type = other DNA

SEQ ID NO: 69520 - DNA, 80 bp, synthetic construct; identical to SEQ ID NO: 12742
  source 1..80: mol_type = other DNA

SEQ ID NO: 69521 - DNA, 80 bp, synthetic construct; identical to SEQ ID NO: 35421
  source 1..80: mol_type = other DNA

SEQ ID NO: 69522 - DNA, 80 bp, synthetic construct; identical to SEQ ID NO: 35422
  source 1..80: mol_type = other DNA

SEQ ID NO: 69523 - DNA, 80 bp, synthetic construct; identical to SEQ ID NO: 35423
  source 1..80: mol_type = other DNA

SEQ ID NO: 69524 - DNA, 80 bp, synthetic construct; identical to SEQ ID NO: 12743
  source 1..80: mol_type = other DNA

SEQ ID NO: 69525 - DNA, 80 bp, synthetic construct; identical to SEQ ID NO: 35425
  source 1..80: mol_type = other DNA

SEQ ID NO: 69526 - DNA, 80 bp, synthetic construct; identical to SEQ ID NO: 35426
  source 1..80: mol_type = other DNA

SEQ ID NO: 69527 - DNA, 80 bp, synthetic construct; identical to SEQ ID NO: 35427
  source 1..80: mol_type = other DNA

SEQ ID NO: 69528 - DNA, 80 bp, synthetic construct; identical to SEQ ID NO: 12744
  source 1..80: mol_type = other DNA

SEQ ID NO: 69529 - DNA, 80 bp, synthetic construct; identical to SEQ ID NO: 35429
  source 1..80: mol_type = other DNA

SEQ ID NO: 69530 - DNA, 80 bp, synthetic construct; identical to SEQ ID NO: 35430
  source 1..80: mol_type = other DNA

SEQ ID NO: 69531 - DNA, 80 bp, synthetic construct; identical to SEQ ID NO: 35431
  source 1..80: mol_type = other DNA

SEQ ID NO: 69532 - DNA, 80 bp, synthetic construct; identical to SEQ ID NO: 35432
  source 1..80: mol_type = other DNA

SEQ ID NO: 69533 - DNA, 80 bp, synthetic construct; identical to SEQ ID NO: 12745
  source 1..80: mol_type = other DNA

SEQ ID NO: 69534 - DNA, 80 bp, synthetic construct; identical to SEQ ID NO: 35435
  source 1..80: mol_type = other DNA

SEQ ID NO: 69535 - DNA, 80 bp, synthetic construct; identical to SEQ ID NO: 35436
  source 1..80: mol_type = other DNA

SEQ ID NO: 69536 - DNA, 80 bp, synthetic construct; identical to SEQ ID NO: 12746
  source 1..80: mol_type = other DNA

SEQ ID NO: 69537 - DNA, 80 bp, synthetic construct; identical to SEQ ID NO: 35438
  source 1..80: mol_type = other DNA

SEQ ID NO: 69538 - DNA, 80 bp, synthetic construct; identical to SEQ ID NO: 35439
  source 1..80: mol_type = other DNA

SEQ ID NO: 69539 - DNA, 80 bp, synthetic construct; identical to SEQ ID NO: 12747
  source 1..80: mol_type = other DNA

SEQ ID NO: 69540 - DNA, 80 bp, synthetic construct; identical to SEQ ID NO: 35441
  source 1..80: mol_type = other DNA

SEQ ID NO: 69541 - DNA, 80 bp, synthetic construct; identical to SEQ ID NO: 35442
  source 1..80: mol_type = other DNA

SEQ ID NO: 69542 - DNA, 80 bp, synthetic construct; identical to SEQ ID NO: 35443
  source 1..80: mol_type = other DNA

SEQ ID NO: 69543 - DNA, 80 bp, synthetic construct; identical to SEQ ID NO: 35444
  source 1..80: mol_type = other DNA

SEQ ID NO: 69544 - DNA, 80 bp, synthetic construct; identical to SEQ ID NO: 12748
  source 1..80: mol_type = other DNA

SEQ ID NO: 69545 - DNA, 80 bp, synthetic construct; identical to SEQ ID NO: 35446
  source 1..80: mol_type = other DNA

SEQ ID NO: 69546 - DNA, 80 bp, synthetic construct; identical to SEQ ID NO: 35447
  source 1..80: mol_type = other DNA

SEQ ID NO: 69547 - DNA, 80 bp, synthetic construct; identical to SEQ ID NO: 35448
  source 1..80: mol_type = other DNA

SEQ ID NO: 69548 - DNA, 80 bp, synthetic construct; identical to SEQ ID NO: 12749
  source 1..80: mol_type = other DNA

SEQ ID NO: 69549 - DNA, 80 bp, synthetic construct; identical to SEQ ID NO: 35450
  source 1..80: mol_type = other DNA

SEQ ID NO: 69550 - DNA, 80 bp, synthetic construct; identical to SEQ ID NO: 35451
  source 1..80: mol_type = other DNA

SEQ ID NO: 69551 - DNA, 80 bp, synthetic construct; identical to SEQ ID NO: 12750
  source 1..80: mol_type = other DNA

SEQ ID NO: 69552 - DNA, 80 bp, synthetic construct; identical to SEQ ID NO: 35453
  source 1..80: mol_type = other DNA

SEQ ID NO: 69553 - DNA, 80 bp, synthetic construct; identical to SEQ ID NO: 35454
  source 1..80: mol_type = other DNA

SEQ ID NO: 69554 - DNA, 80 bp, synthetic construct; identical to SEQ ID NO: 35455
  source 1..80: mol_type = other DNA

SEQ ID NO: 69555 - DNA, 80 bp, synthetic construct; identical to SEQ ID NO: 12751
  source 1..80: mol_type = other DNA

SEQ ID NO: 69556 - DNA, 80 bp, synthetic construct; identical to SEQ ID NO: 35457
  source 1..80: mol_type = other DNA

SEQ ID NO: 69557 - DNA, 80 bp, synthetic construct; identical to SEQ ID NO: 35458
  source 1..80: mol_type = other DNA

SEQ ID NO: 69558 - DNA, 80 bp, synthetic construct; identical to SEQ ID NO: 35459
  source 1..80: mol_type = other DNA

SEQ ID NO: 69559 - DNA, 80 bp, synthetic construct; identical to SEQ ID NO: 12752
  source 1..80: mol_type = other DNA

SEQ ID NO: 69560 - DNA, 80 bp, synthetic construct; identical to SEQ ID NO: 35461
  source 1..80: mol_type = other DNA

SEQ ID NO: 69561 - DNA, 80 bp, synthetic construct; identical to SEQ ID NO: 35462
  source 1..80: mol_type = other DNA

SEQ ID NO: 69562 - DNA, 80 bp, synthetic construct; identical to SEQ ID NO: 35463
  source 1..80: mol_type = other DNA

SEQ ID NO: 69563 - DNA, 80 bp, synthetic construct; identical to SEQ ID NO: 35464
  source 1..80: mol_type = other DNA

SEQ ID NO: 69564 - DNA, 80 bp, synthetic construct; identical to SEQ ID NO: 12753
  source 1..80: mol_type = other DNA

SEQ ID NO: 69565 - DNA, 80 bp, synthetic construct; identical to SEQ ID NO: 35466
  source 1..80: mol_type = other DNA

SEQ ID NO: 69566 - DNA, 80 bp, synthetic construct; identical to SEQ ID NO: 35467
  source 1..80: mol_type = other DNA

SEQ ID NO: 69567 - DNA, 80 bp, synthetic construct; identical to SEQ ID NO: 12754
  source 1..80: mol_type = other DNA

SEQ ID NO: 69568 - DNA, 80 bp, synthetic construct; identical to SEQ ID NO: 35469
  source 1..80: mol_type = other DNA

SEQ ID NO: 69569 - DNA, 80 bp, synthetic construct; identical to SEQ ID NO: 35470
  source 1..80: mol_type = other DNA

SEQ ID NO: 69570 - DNA, 80 bp, synthetic construct; identical to SEQ ID NO: 35471
  source 1..80: mol_type = other DNA

SEQ ID NO: 69571 - DNA, 80 bp, synthetic construct; identical to SEQ ID NO: 12755
  source 1..80: mol_type = other DNA

SEQ ID NO: 69572 - DNA, 80 bp, synthetic construct; identical to SEQ ID NO: 35473
  source 1..80: mol_type = other DNA

SEQ ID NO: 69573 - DNA, 80 bp, synthetic construct; identical to SEQ ID NO: 35474
  source 1..80: mol_type = other DNA

SEQ ID NO: 69574 - DNA, 80 bp, synthetic construct; identical to SEQ ID NO: 35475
  source 1..80: mol_type = other DNA

SEQ ID NO: 69575 - DNA, 80 bp, synthetic construct; identical to SEQ ID NO: 12756
  source 1..80: mol_type = other DNA

SEQ ID NO: 69576 - DNA, 80 bp, synthetic construct; identical to SEQ ID NO: 35477
  source 1..80: mol_type = other DNA

SEQ ID NO: 69577 - DNA, 80 bp, synthetic construct; identical to SEQ ID NO: 35478
  source 1..80: mol_type = other DNA

SEQ ID NO: 69578 - DNA, 80 bp, synthetic construct; identical to SEQ ID NO: 35479
  source 1..80: mol_type = other DNA

SEQ ID NO: 69579 - DNA, 80 bp, synthetic construct; identical to SEQ ID NO: 35480
  source 1..80: mol_type = other DNA

SEQ ID NO: 69580 - DNA, 80 bp, synthetic construct; identical to SEQ ID NO: 12757
  source 1..80: mol_type = other DNA

SEQ ID NO: 69581 - DNA, 80 bp, synthetic construct; identical to SEQ ID NO: 35482
  source 1..80: mol_type = other DNA

SEQ ID NO: 69582 - DNA, 80 bp, synthetic construct; identical to SEQ ID NO: 35483
  source 1..80: mol_type = other DNA

SEQ ID NO: 69583 - DNA, 80 bp, synthetic construct; identical to SEQ ID NO: 35484
  source 1..80: mol_type = other DNA

SEQ ID NO: 69584 - DNA, 80 bp, synthetic construct; identical to SEQ ID NO: 12758
  source 1..80: mol_type = other DNA

SEQ ID NO: 69585 - DNA, 80 bp, synthetic construct; identical to SEQ ID NO: 35486
  source 1..80: mol_type = other DNA

SEQ ID NO: 69586 - DNA, 80 bp, synthetic construct; identical to SEQ ID NO: 35487
  source 1..80: mol_type = other DNA

SEQ ID NO: 69587 - DNA, 80 bp, synthetic construct; identical to SEQ ID NO: 12759
  source 1..80: mol_type = other DNA

SEQ ID NO: 69588 - DNA, 80 bp, synthetic construct; identical to SEQ ID NO: 35489
  source 1..80: mol_type = other DNA

SEQ ID NO: 69589 - DNA, 80 bp, synthetic construct; identical to SEQ ID NO: 35490
  source 1..80: mol_type = other DNA

SEQ ID NO: 69590 - DNA, 80 bp, synthetic construct; identical to SEQ ID NO: 35491
  source 1..80: mol_type = other DNA

SEQ ID NO: 69591 - DNA, 80 bp, synthetic construct; identical to SEQ ID NO: 12760
  source 1..80: mol_type = other DNA

SEQ ID NO: 69592 - DNA, 80 bp, synthetic construct; identical to SEQ ID NO: 35493
  source 1..80: mol_type = other DNA

SEQ ID NO: 69593 - DNA, 80 bp, synthetic construct; identical to SEQ ID NO: 35494
  source 1..80: mol_type = other DNA

SEQ ID NO: 69594 - DNA, 80 bp, synthetic construct; identical to SEQ ID NO: 35495
  source 1..80: mol_type = other DNA

SEQ ID NO: 69595 - DNA, 80 bp, synthetic construct; identical to SEQ ID NO: 12761
  source 1..80: mol_type = other DNA

SEQ ID NO: 69596 - DNA, 80 bp, synthetic construct; identical to SEQ ID NO: 35497
  source 1..80: mol_type = other DNA

SEQ ID NO: 69597 - DNA, 80 bp, synthetic construct; identical to SEQ ID NO: 35498
  source 1..80: mol_type = other DNA

SEQ ID NO: 69598 - DNA, 80 bp, synthetic construct; identical to SEQ ID NO: 35499
  source 1..80: mol_type = other DNA

SEQ ID NO: 69599 - DNA, 80 bp, synthetic construct; identical to SEQ ID NO: 35500
  source 1..80: mol_type = other DNA

SEQ ID NO: 69600 - DNA, 80 bp, synthetic construct; identical to SEQ ID NO: 12762
  source 1..80: mol_type = other DNA

SEQ ID NO: 69601 - DNA, 80 bp, synthetic construct; identical to SEQ ID NO: 35502
  source 1..80: mol_type = other DNA

SEQ ID NO: 69602 - DNA, 80 bp, synthetic construct; identical to SEQ ID NO: 35503
  source 1..80: mol_type = other DNA

SEQ ID NO: 69603 - DNA, 80 bp, synthetic construct; identical to SEQ ID NO: 35504
  source 1..80: mol_type = other DNA

SEQ ID NO: 69604 - DNA, 80 bp, synthetic construct; identical to SEQ ID NO: 12763
  source 1..80: mol_type = other DNA

SEQ ID NO: 69605 - DNA, 80 bp, synthetic construct; identical to SEQ ID NO: 35506
  source 1..80: mol_type = other DNA

SEQ ID NO: 69606 - DNA, 80 bp, synthetic construct; identical to SEQ ID NO: 35507
  source 1..80: mol_type = other DNA

SEQ ID NO: 69607 - DNA, 80 bp, synthetic construct; identical to SEQ ID NO: 35508
  source 1..80: mol_type = other DNA

SEQ ID NO: 69608 - DNA, 80 bp, synthetic construct; identical to SEQ ID NO: 12764
  source 1..80: mol_type = other DNA

SEQ ID NO: 69609 - DNA, 80 bp, synthetic construct; identical to SEQ ID NO: 35510
  source 1..80: mol_type = other DNA

SEQ ID NO: 69610 - DNA, 80 bp, synthetic construct; identical to SEQ ID NO: 35511
  source 1..80: mol_type = other DNA

SEQ ID NO: 69611 - DNA, 80 bp, synthetic construct; identical to SEQ ID NO: 35512
  source 1..80: mol_type = other DNA

SEQ ID NO: 69612 - DNA, 80 bp, synthetic construct; identical to SEQ ID NO: 12765
  source 1..80: mol_type = other DNA

SEQ ID NO: 69613 - DNA, 80 bp, synthetic construct; identical to SEQ ID NO: 35514
  source 1..80: mol_type = other DNA

SEQ ID NO: 69614 - DNA, 80 bp, synthetic construct; identical to SEQ ID NO: 35515
  source 1..80: mol_type = other DNA

SEQ ID NO: 69615 - DNA, 80 bp, synthetic construct; identical to SEQ ID NO: 12766
  source 1..80: mol_type = other DNA

SEQ ID NO: 69616 - DNA, 80 bp, synthetic construct; identical to SEQ ID NO: 35517
  source 1..80: mol_type = other DNA

SEQ ID NO: 69617 - DNA, 80 bp, synthetic construct; identical to SEQ ID NO: 35518
  source 1..80: mol_type = other DNA

SEQ ID NO: 69618 - DNA, 80 bp, synthetic construct; identical to SEQ ID NO: 35519
  source 1..80: mol_type = other DNA

SEQ ID NO: 69619 - DNA, 80 bp, synthetic construct; identical to SEQ ID NO: 35520
  source 1..80: mol_type = other DNA

SEQ ID NO: 69620 - DNA, 80 bp, synthetic construct; identical to SEQ ID NO: 12767
  source 1..80: mol_type = other DNA

SEQ ID NO: 69621 - DNA, 80 bp, synthetic construct; identical to SEQ ID NO: 35522
  source 1..80: mol_type = other DNA

SEQ ID NO: 69622 - DNA, 80 bp, synthetic construct; identical to SEQ ID NO: 35523
  source 1..80: mol_type = other DNA

SEQ ID NO: 69623 - DNA, 80 bp, synthetic construct; identical to SEQ ID NO: 12768
  source 1..80: mol_type = other DNA

SEQ ID NO: 69624 - DNA, 80 bp, synthetic construct; identical to SEQ ID NO: 35525
  source 1..80: mol_type = other DNA

SEQ ID NO: 69625 - DNA, 80 bp, synthetic construct; identical to SEQ ID NO: 35526
  source 1..80: mol_type = other DNA

SEQ ID NO: 69626 - DNA, 80 bp, synthetic construct; identical to SEQ ID NO: 35527
  source 1..80: mol_type = other DNA

SEQ ID NO: 69627 - DNA, 80 bp, synthetic construct; identical to SEQ ID NO: 12769
  source 1..80: mol_type = other DNA

SEQ ID NO: 69628 - DNA, 80 bp, synthetic construct; identical to SEQ ID NO: 35529
  source 1..80: mol_type = other DNA

SEQ ID NO: 69629 - DNA, 80 bp, synthetic construct; identical to SEQ ID NO: 35530
  source 1..80: mol_type = other DNA

SEQ ID NO: 69630 - DNA, 80 bp, synthetic construct; identical to SEQ ID NO: 35531
  source 1..80: mol_type = other DNA

SEQ ID NO: 69631 - DNA, 80 bp, synthetic construct; identical to SEQ ID NO: 35532
  source 1..80: mol_type = other DNA

SEQ ID NO: 69632 - DNA, 80 bp, synthetic construct; identical to SEQ ID NO: 12770
  source 1..80: mol_type = other DNA

SEQ ID NO: 69633 - DNA, 80 bp, synthetic construct; identical to SEQ ID NO: 35534
  source 1..80: mol_type = other DNA

SEQ ID NO: 69634 - DNA, 80 bp, synthetic construct; identical to SEQ ID NO: 35535
  source 1..80: mol_type = other DNA

SEQ ID NO: 69635 - DNA, 80 bp, synthetic construct; identical to SEQ ID NO: 35536
  source 1..80: mol_type = other DNA

SEQ ID NO: 69636 - DNA, 80 bp, synthetic construct; identical to SEQ ID NO: 35537
  source 1..80: mol_type = other DNA

SEQ ID NO: 69637 - DNA, 80 bp, synthetic construct; identical to SEQ ID NO: 12771
  source 1..80: mol_type = other DNA

SEQ ID NO: 69638 - DNA, 80 bp, synthetic construct; identical to SEQ ID NO: 35539
  source 1..80: mol_type = other DNA

SEQ ID NO: 69639 - DNA, 80 bp, synthetic construct; identical to SEQ ID NO: 35540
  source 1..80: mol_type = other DNA

SEQ ID NO: 69640 - DNA, 80 bp, synthetic construct; identical to SEQ ID NO: 35541
  source 1..80: mol_type = other DNA

SEQ ID NO: 69641 - DNA, 80 bp, synthetic construct; identical to SEQ ID NO: 12772
  source 1..80: mol_type = other DNA

SEQ ID NO: 69642 - DNA, 80 bp, synthetic construct; identical to SEQ ID NO: 35543
  source 1..80: mol_type = other DNA

SEQ ID NO: 69643 - DNA, 80 bp, synthetic construct; identical to SEQ ID NO: 35544
  source 1..80: mol_type = other DNA

SEQ ID NO: 69644 - DNA, 80 bp, synthetic construct; identical to SEQ ID NO: 35545
  source 1..80: mol_type = other DNA

SEQ ID NO: 69645 - DNA, 80 bp, synthetic construct; identical to SEQ ID NO: 12773
  source 1..80: mol_type = other DNA

SEQ ID NO: 69646 - DNA, 80 bp, synthetic construct; identical to SEQ ID NO: 35547
  source 1..80: mol_type = other DNA

SEQ ID NO: 69647 - DNA, 80 bp, synthetic construct; identical to SEQ ID NO: 35548
  source 1..80: mol_type = other DNA

SEQ ID NO: 69648 - DNA, 80 bp, synthetic construct; identical to SEQ ID NO: 12774
  source 1..80: mol_type = other DNA

SEQ ID NO: 69649 - DNA, 80 bp, synthetic construct; identical to SEQ ID NO: 35550
  source 1..80: mol_type = other DNA

SEQ ID NO: 69650 - DNA, 80 bp, synthetic construct; identical to SEQ ID NO: 35551
  source 1..80: mol_type = other DNA

SEQ ID NO: 69651 - DNA, 80 bp, synthetic construct; identical to SEQ ID NO: 35552
  source 1..80: mol_type = other DNA

SEQ ID NO: 69652 - DNA, 80 bp, synthetic construct; identical to SEQ ID NO: 12775
  source 1..80: mol_type = other DNA

SEQ ID NO: 69653 - DNA, 80 bp, synthetic construct; identical to SEQ ID NO: 35554
  source 1..80: mol_type = other DNA

SEQ ID NO: 69654 - DNA, 80 bp, synthetic construct; identical to SEQ ID NO: 35555
  source 1..80: mol_type = other DNA

SEQ ID NO: 69655 - DNA, 80 bp, synthetic construct; identical to SEQ ID NO: 35556
  source 1..80: mol_type = other DNA

SEQ ID NO: 69656 - DNA, 80 bp, synthetic construct; identical to SEQ ID NO: 12776
  source 1..80: mol_type = other DNA

SEQ ID NO: 69657 - DNA, 80 bp, synthetic construct; identical to SEQ ID NO: 35558
  source 1..80: mol_type = other DNA

SEQ ID NO: 69658 - DNA, 80 bp, synthetic construct; identical to SEQ ID NO: 35559
  source 1..80: mol_type = other DNA

SEQ ID NO: 69659 - DNA, 80 bp, synthetic construct; identical to SEQ ID NO: 35560
  source 1..80: mol_type = other DNA

SEQ ID NO: 69660 - DNA, 80 bp, synthetic construct; identical to SEQ ID NO: 12777
  source 1..80: mol_type = other DNA

SEQ ID NO: 69661 - DNA, 80 bp, synthetic construct; identical to SEQ ID NO: 35563
  source 1..80: mol_type = other DNA

SEQ ID NO: 69662 - DNA, 80 bp, synthetic construct; identical to SEQ ID NO: 35564
  source 1..80: mol_type = other DNA

SEQ ID NO: 69663 - DNA, 80 bp, synthetic construct; identical to SEQ ID NO: 35565
  source 1..80: mol_type = other DNA

SEQ ID NO: 69664 - DNA, 80 bp, synthetic construct; identical to SEQ ID NO: 12778
  source 1..80: mol_type = other DNA

SEQ ID NO: 69665 - DNA, 80 bp, synthetic construct; identical to SEQ ID NO: 35567
  source 1..80: mol_type = other DNA

SEQ ID NO: 69666 - DNA, 80 bp, synthetic construct; identical to SEQ ID NO: 35568
  source 1..80: mol_type = other DNA

SEQ ID NO: 69667 - DNA, 80 bp, synthetic construct; identical to SEQ ID NO: 12779
  source 1..80: mol_type = other DNA

SEQ ID NO: 69668 - DNA, 80 bp, synthetic construct; identical to SEQ ID NO: 35570
  source 1..80: mol_type = other DNA

SEQ ID NO: 69669 - DNA, 80 bp, synthetic construct; identical to SEQ ID NO: 35571
  source 1..80: mol_type = other DNA

SEQ ID NO: 69670 - DNA, 80 bp, synthetic construct; identical to SEQ ID NO: 35572
  source 1..80: mol_type = other DNA

SEQ ID NO: 69671 - DNA, 80 bp, synthetic construct; identical to SEQ ID NO: 35573
  source 1..80: mol_type = other DNA

SEQ ID NO: 69672 - DNA, 80 bp, synthetic construct; identical to SEQ ID NO: 12780
  source 1..80: mol_type = other DNA

SEQ ID NO: 69673 - DNA, 80 bp, synthetic construct; identical to SEQ ID NO: 35575
  source 1..80: mol_type = other DNA

SEQ ID NO: 69674 - DNA, 80 bp, synthetic construct; identical to SEQ ID NO: 35576
  source 1..80: mol_type = other DNA

SEQ ID NO: 69675 - DNA, 80 bp, synthetic construct; identical to SEQ ID NO: 12781
  source 1..80: mol_type = other DNA

SEQ ID NO: 69676 - DNA, 80 bp, synthetic construct; identical to SEQ ID NO: 35578
  source 1..80: mol_type = other DNA

SEQ ID NO: 69677 - DNA, 80 bp, synthetic construct; identical to SEQ ID NO: 35579
  source 1..80: mol_type = other DNA

SEQ ID NO: 69678 - DNA, 80 bp, synthetic construct; identical to SEQ ID NO: 35580
  source 1..80: mol_type = other DNA

SEQ ID NO: 69679 - DNA, 80 bp, synthetic construct; identical to SEQ ID NO: 12782
  source 1..80: mol_type = other DNA

SEQ ID NO: 69680 - DNA, 80 bp, synthetic construct; identical to SEQ ID NO: 35582
  source 1..80: mol_type = other DNA

SEQ ID NO: 69681 - DNA, 80 bp, synthetic construct; identical to SEQ ID NO: 35583
  source 1..80: mol_type = other DNA

SEQ ID NO: 69682 - DNA, 80 bp, synthetic construct; identical to SEQ ID NO: 35584
  source 1..80: mol_type = other DNA

SEQ ID NO: 69683 - DNA, 80 bp, synthetic construct; identical to SEQ ID NO: 12783
  source 1..80: mol_type = other DNA

SEQ ID NO: 69684 - DNA, 80 bp, synthetic construct; identical to SEQ ID NO: 35586
  source 1..80: mol_type = other DNA

SEQ ID NO: 69685 - DNA, 80 bp, synthetic construct; identical to SEQ ID NO: 35587
  source 1..80: mol_type = other DNA

SEQ ID NO: 69686 - DNA, 80 bp, synthetic construct; identical to SEQ ID NO: 35588
  source 1..80: mol_type = other DNA

SEQ ID NO: 69687 - DNA, 80 bp, synthetic construct; identical to SEQ ID NO: 12784
  source 1..80: mol_type = other DNA

SEQ ID NO: 69688 - DNA, 80 bp, synthetic construct; identical to SEQ ID NO: 35590
  source 1..80: mol_type = other DNA

SEQ ID NO: 69689 - DNA, 80 bp, synthetic construct; identical to SEQ ID NO: 35591
  source 1..80: mol_type = other DNA

SEQ ID NO: 69690 - DNA, 80 bp, synthetic construct; identical to SEQ ID NO: 35592
  source 1..80: mol_type = other DNA

SEQ ID NO: 69691 - DNA, 80 bp, synthetic construct; identical to SEQ ID NO: 35593
  source 1..80: mol_type = other DNA

SEQ ID NO: 69692 - DNA, 80 bp, synthetic construct; identical to SEQ ID NO: 12785
  source 1..80: mol_type = other DNA

SEQ ID NO: 69693 - DNA, 80 bp, synthetic construct; identical to SEQ ID NO: 35595
  source 1..80: mol_type = other DNA

SEQ ID NO: 69694 - DNA, 80 bp, synthetic construct; identical to SEQ ID NO: 35596
  source 1..80: mol_type = other DNA

SEQ ID NO: 69695 - DNA, 80 bp, synthetic construct; identical to SEQ ID NO: 35598
  source 1..80: mol_type = other DNA

SEQ ID NO: 69696 - DNA, 80 bp, synthetic construct; identical to SEQ ID NO: 12786
  source 1..80: mol_type = other DNA

SEQ ID NO: 69697 - DNA, 80 bp, synthetic construct; identical to SEQ ID NO: 35600
  source 1..80: mol_type = other DNA

SEQ ID NO: 69698 - DNA, 80 bp, synthetic construct; identical to SEQ ID NO: 35601
  source 1..80: mol_type = other DNA

SEQ ID NO: 69699 - DNA, 80 bp, synthetic construct; identical to SEQ ID NO: 12787
  source 1..80: mol_type = other DNA

SEQ ID NO: 69700 - DNA, 80 bp, synthetic construct; identical to SEQ ID NO: 35603
  source 1..80: mol_type = other DNA

SEQ ID NO: 69701 - DNA, 80 bp, synthetic construct; identical to SEQ ID NO: 35604
  source 1..80: mol_type = other DNA

SEQ ID NO: 69702 - DNA, 80 bp, synthetic construct; identical to SEQ ID NO: 35605
  source 1..80: mol_type = other DNA

SEQ ID NO: 69703 - DNA, 80 bp, synthetic construct; identical to SEQ ID NO: 12788
  source 1..80: mol_type = other DNA

SEQ ID NO: 69704 - DNA, 80 bp, synthetic construct; identical to SEQ ID NO: 35607
  source 1..80: mol_type = other DNA

SEQ ID NO: 69705 - DNA, 80 bp, synthetic construct; identical to SEQ ID NO: 35608
  source 1..80: mol_type = other DNA

SEQ ID NO: 69706 - DNA, 80 bp, synthetic construct; identical to SEQ ID NO: 35609
  source 1..80: mol_type = other DNA

SEQ ID NO: 69707 - DNA, 80 bp, synthetic construct; identical to SEQ ID NO: 35610
  source 1..80: mol_type = other DNA

SEQ ID NO: 69708 - DNA, 80 bp, synthetic construct; identical to SEQ ID NO: 12789
  source 1..80: mol_type = other DNA

SEQ ID NO: 69709 - DNA, 80 bp, synthetic construct; identical to SEQ ID NO: 35612
  source 1..80: mol_type = other DNA

SEQ ID NO: 69710 - DNA, 80 bp, synthetic construct; identical to SEQ ID NO: 35613
  source 1..80: mol_type = other DNA

SEQ ID NO: 69711 - DNA, 80 bp, synthetic construct; identical to SEQ ID NO: 12790
  source 1..80: mol_type = other DNA

SEQ ID NO: 69712 - DNA, 80 bp, synthetic construct; identical to SEQ ID NO: 35615
  source 1..80: mol_type = other DNA

SEQ ID NO: 69713 - DNA, 80 bp, synthetic construct; identical to SEQ ID NO: 35616
  source 1..80: mol_type = other DNA

SEQ ID NO: 69714 - DNA, 80 bp, synthetic construct; identical to SEQ ID NO: 35617
  source 1..80: mol_type = other DNA

SEQ ID NO: 69715 - DNA, 80 bp, synthetic construct; identical to SEQ ID NO: 12791
  source 1..80: mol_type = other DNA

SEQ ID NO: 69716 - DNA, 80 bp, synthetic construct; identical to SEQ ID NO: 35619
  source 1..80: mol_type = other DNA

SEQ ID NO: 69717 - DNA, 80 bp, synthetic construct; identical to SEQ ID NO: 35620
  source 1..80: mol_type = other DNA

SEQ ID NO: 69718 - DNA, 80 bp, synthetic construct; identical to SEQ ID NO: 35621
  source 1..80: mol_type = other DNA

SEQ ID NO: 69719 - DNA, 80 bp, synthetic construct; identical to SEQ ID NO: 12792
  source 1..80: mol_type = other DNA

SEQ ID NO: 69720 - DNA, 80 bp, synthetic construct; identical to SEQ ID NO: 35623
  source 1..80: mol_type = other DNA

SEQ ID NO: 69721 - DNA, 80 bp, synthetic construct; identical to SEQ ID NO: 35624
  source 1..80: mol_type = other DNA

SEQ ID NO: 69722 - DNA, 80 bp, synthetic construct; identical to SEQ ID NO: 35625
  source 1..80: mol_type = other DNA

SEQ ID NO: 69723 - DNA, 80 bp, synthetic construct; identical to SEQ ID NO: 35626
  source 1..80: mol_type = other DNA

SEQ ID NO: 69724 - DNA, 80 bp, synthetic construct; identical to SEQ ID NO: 12793
  source 1..80: mol_type = other DNA

SEQ ID NO: 69725 - DNA, 80 bp, synthetic construct; identical to SEQ ID NO: 35628
  source 1..80: mol_type = other DNA

SEQ ID NO: 69726 - DNA, 80 bp, synthetic construct; identical to SEQ ID NO: 35629
  source 1..80: mol_type = other DNA

SEQ ID NO: 69727 - DNA, 80 bp, synthetic construct; identical to SEQ ID NO: 12794
  source 1..80: mol_type = other DNA

SEQ ID NO: 69728 - DNA, 80 bp, synthetic construct; identical to SEQ ID NO: 35631
  source 1..80: mol_type = other DNA

SEQ ID NO: 69729 - DNA, 80 bp, synthetic construct; identical to SEQ ID NO: 35632
  source 1..80: mol_type = other DNA

SEQ ID NO: 69730 - DNA, 80 bp, synthetic construct; identical to SEQ ID NO: 35633
  source 1..80: mol_type = other DNA

SEQ ID NO: 69731 - DNA, 80 bp, synthetic construct; identical to SEQ ID NO: 12795
  source 1..80: mol_type = other DNA

SEQ ID NO: 69732 - DNA, 80 bp, synthetic construct; identical to SEQ ID NO: 35635
  source 1..80: mol_type = other DNA

SEQ ID NO: 69733 - DNA, 80 bp, synthetic construct; identical to SEQ ID NO: 35636
  source 1..80: mol_type = other DNA

SEQ ID NO: 69734 - DNA, 80 bp, synthetic construct; identical to SEQ ID NO: 35637
  source 1..80: mol_type = other DNA

SEQ ID NO: 69735 - DNA, 80 bp, synthetic construct; identical to SEQ ID NO: 12796
  source 1..80: mol_type = other DNA

SEQ ID NO: 69736 - DNA, 80 bp, synthetic construct; identical to SEQ ID NO: 35639
  source 1..80: mol_type = other DNA

SEQ ID NO: 69737 - DNA, 80 bp, synthetic construct; identical to SEQ ID NO: 35640
  source 1..80: mol_type = other DNA

SEQ ID NO: 69738 - DNA, 80 bp, synthetic construct; identical to SEQ ID NO: 35641
  source 1..80: mol_type = other DNA

SEQ ID NO: 69739 - DNA, 80 bp, synthetic construct; identical to SEQ ID NO: 35642
  source 1..80: mol_type = other DNA

SEQ ID NO: 69740 - DNA, 80 bp, synthetic construct; identical to SEQ ID NO: 12797
  source 1..80: mol_type = other DNA

SEQ ID NO: 69741 - DNA, 80 bp, synthetic construct; identical to SEQ ID NO: 35644
  source 1..80: mol_type = other DNA

SEQ ID NO: 69742 - DNA, 80 bp, synthetic construct; identical to SEQ ID NO: 35645
  source 1..80: mol_type = other DNA

SEQ ID NO: 69743 - DNA, 80 bp, synthetic construct; identical to SEQ ID NO: 12798
  source 1..80: mol_type = other DNA

SEQ ID NO: 69744 - DNA, 80 bp, synthetic construct; identical to SEQ ID NO: 35647
  source 1..80: mol_type = other DNA

SEQ ID NO: 69745 - DNA, 80 bp, synthetic construct; identical to SEQ ID NO: 35648
  source 1..80: mol_type = other DNA

SEQ ID NO: 69746 - DNA, 80 bp, synthetic construct; identical to SEQ ID NO: 35649
  source 1..80: mol_type = other DNA

SEQ ID NO: 69747 - DNA, 80 bp, synthetic construct; identical to SEQ ID NO: 12799
  source 1..80: mol_type = other DNA

SEQ ID NO: 69748 - DNA, 80 bp, synthetic construct; identical to SEQ ID NO: 35651
  source 1..80: mol_type = other DNA

SEQ ID NO: 69749 - DNA, 80 bp, synthetic construct; identical to SEQ ID NO: 35652
  source 1..80: mol_type = other DNA

SEQ ID NO: 69750 - DNA, 80 bp, synthetic construct; identical to SEQ ID NO: 35653
  source 1..80: mol_type = other DNA

SEQ ID NO: 69751 - DNA, 80 bp, synthetic construct; identical to SEQ ID NO: 35654
  source 1..80: mol_type = other DNA

SEQ ID NO: 69752 - DNA, 80 bp, synthetic construct; identical to SEQ ID NO: 12800
  source 1..80: mol_type = other DNA

SEQ ID NO: 69753 - DNA, 80 bp, synthetic construct; identical to SEQ ID NO: 35656
  source 1..80: mol_type = other DNA

SEQ ID NO: 69754 - DNA, 80 bp, synthetic construct; identical to SEQ ID NO: 35657
  source 1..80: mol_type = other DNA

SEQ ID NO: 69755 - DNA, 80 bp, synthetic construct; identical to SEQ ID NO: 35658
  source 1..80: mol_type = other DNA

SEQ ID NO: 69756 - DNA, 80 bp, synthetic construct; identical to SEQ ID NO: 12801
  source 1..80: mol_type = other DNA

SEQ ID NO: 69757 - DNA, 80 bp, synthetic construct; identical to SEQ ID NO: 35660
  source 1..80: mol_type = other DNA

SEQ ID NO: 69758 - DNA, 80 bp, synthetic construct; identical to SEQ ID NO: 35661
  source 1..80: mol_type = other DNA

SEQ ID NO: 69759 - DNA, 80 bp, synthetic construct; identical to SEQ ID NO: 35662
  source 1..80: mol_type = other DNA

SEQ ID NO: 69760 - DNA, 80 bp, synthetic construct; identical to SEQ ID NO: 12802
  source 1..80: mol_type = other DNA

SEQ ID NO: 69761 - DNA, 80 bp, synthetic construct; identical to SEQ ID NO: 35664
  source 1..80: mol_type = other DNA

SEQ ID NO: 69762 - DNA, 80 bp, synthetic construct; identical to SEQ ID NO: 35665
  source 1..80: mol_type = other DNA

SEQ ID NO: 69763 - DNA, 80 bp, synthetic construct; identical to SEQ ID NO: 12803
  source 1..80: mol_type = other DNA

SEQ ID NO: 69764 - DNA, 80 bp, synthetic construct; identical to SEQ ID NO: 35667
  source 1..80: mol_type = other DNA

SEQ ID NO: 69765 - DNA, 80 bp, synthetic construct; identical to SEQ ID NO: 35668
  source 1..80: mol_type = other DNA

SEQ ID NO: 69766 - DNA, 80 bp, synthetic construct; identical to SEQ ID NO: 35669
  source 1..80: mol_type = other DNA

SEQ ID NO: 69767 - DNA, 80 bp, synthetic construct; identical to SEQ ID NO: 12804
  source 1..80: mol_type = other DNA

SEQ ID NO: 69768 - DNA, 80 bp, synthetic construct; identical to SEQ ID NO: 35671
  source 1..80: mol_type = other DNA

SEQ ID NO: 69769 - DNA, 80 bp, synthetic construct; identical to SEQ ID NO: 35672
  source 1..80: mol_type = other DNA

SEQ ID NO: 69770 - DNA, 80 bp, synthetic construct; identical to SEQ ID NO: 35673
  source 1..80: mol_type = other DNA

SEQ ID NO: 69771 - DNA, 80 bp, synthetic construct; identical to SEQ ID NO: 12805
  source 1..80: mol_type = other DNA

SEQ ID NO: 69772 - DNA, 80 bp, synthetic construct; identical to SEQ ID NO: 35675
  source 1..80: mol_type = other DNA

SEQ ID NO: 69773 - DNA, 80 bp, synthetic construct; identical to SEQ ID NO: 35676
  source 1..80: mol_type = other DNA

SEQ ID NO: 69774 - DNA, 80 bp, synthetic construct; identical to SEQ ID NO: 35677
  source 1..80: mol_type = other DNA

SEQ ID NO: 69775 - DNA, 80 bp, synthetic construct; identical to SEQ ID NO: 35678
  source 1..80: mol_type = other DNA

SEQ ID NO: 69776 - DNA, 80 bp, synthetic construct; identical to SEQ ID NO: 12806
  source 1..80: mol_type = other DNA

SEQ ID NO: 69777 - DNA, 80 bp, synthetic construct; identical to SEQ ID NO: 35680
  source 1..80: mol_type = other DNA

SEQ ID NO: 69778 - DNA, 80 bp, synthetic construct; identical to SEQ ID NO: 35681
  source 1..80: mol_type = other DNA

SEQ ID NO: 69779 - DNA, 80 bp, synthetic construct; identical to SEQ ID NO: 35682
  source 1..80: mol_type = other DNA

SEQ ID NO: 69780 - DNA, 80 bp, synthetic construct; identical to SEQ ID NO: 12807
  source 1..80: mol_type = other DNA

SEQ ID NO: 69781 - DNA, 80 bp, synthetic construct; identical to SEQ ID NO: 35684
  source 1..80: mol_type = other DNA

SEQ ID NO: 69782 - DNA, 80 bp, synthetic construct; identical to SEQ ID NO: 35685
  source 1..80: mol_type = other DNA

SEQ ID NO: 69783 - DNA, 80 bp, synthetic construct; identical to SEQ ID NO: 12808
  source 1..80: mol_type = other DNA

SEQ ID NO: 69784 - DNA, 80 bp, synthetic construct; identical to SEQ ID NO: 35687
  source 1..80: mol_type = other DNA

SEQ ID NO: 69785 - DNA, 80 bp, synthetic construct; identical to SEQ ID NO: 35688
  source 1..80: mol_type = other DNA

SEQ ID NO: 69786 - DNA, 80 bp, synthetic construct; identical to SEQ ID NO: 35689
  source 1..80: mol_type = other DNA

SEQ ID NO: 69787 - DNA, 80 bp, synthetic construct; identical to SEQ ID NO: 12809
  source 1..80: mol_type = other DNA

SEQ ID NO: 69788 - DNA, 80 bp, synthetic construct; identical to SEQ ID NO: 35691
  source 1..80: mol_type = other DNA

SEQ ID NO: 69789 - DNA, 80 bp, synthetic construct; identical to SEQ ID NO: 35692
  source 1..80: mol_type = other DNA

SEQ ID NO: 69790 - DNA, 80 bp, synthetic construct; identical to SEQ ID NO: 35693
  source 1..80: mol_type = other DNA

SEQ ID NO: 69791 - DNA, 80 bp, synthetic construct; identical to SEQ ID NO: 35694
  source 1..80: mol_type = other DNA

SEQ ID NO: 69792 - DNA, 80 bp, synthetic construct; identical to SEQ ID NO: 12810
  source 1..80: mol_type = other DNA

SEQ ID NO: 69793 - DNA, 80 bp, synthetic construct; identical to SEQ ID NO: 35696
  source 1..80: mol_type = other DNA

SEQ ID NO: 69794 - DNA, 80 bp, synthetic construct; identical to SEQ ID NO: 35697
  source 1..80: mol_type = other DNA

SEQ ID NO: 69795 - DNA, 80 bp, synthetic construct; identical to SEQ ID NO: 12811
  source 1..80: mol_type = other DNA

SEQ ID NO: 69796 - DNA, 80 bp, synthetic construct; identical to SEQ ID NO: 35699
  source 1..80: mol_type = other DNA

SEQ ID NO: 69797 - DNA, 80 bp, synthetic construct; identical to SEQ ID NO: 35700
  source 1..80: mol_type = other DNA

SEQ ID NO: 69798 - DNA, 80 bp, synthetic construct; identical to SEQ ID NO: 35701
  source 1..80: mol_type = other DNA

SEQ ID NO: 69799 - DNA, 80 bp, synthetic construct; identical to SEQ ID NO: 35702
  source 1..80: mol_type = other DNA

SEQ ID NO: 69800 - DNA, 80 bp, synthetic construct; identical to SEQ ID NO: 12812
  source 1..80: mol_type = other DNA

SEQ ID NO: 69801 - DNA, 80 bp, synthetic construct; identical to SEQ ID NO: 35704
  source 1..80: mol_type = other DNA

SEQ ID NO: 69802 - DNA, 80 bp, synthetic construct; identical to SEQ ID NO: 12813
  source 1..80: mol_type = other DNA

SEQ ID NO: 69803 - DNA, 80 bp, synthetic construct; identical to SEQ ID NO: 35707
  source 1..80: mol_type = other DNA

SEQ ID NO: 69804 - DNA, 80 bp, synthetic construct; identical to SEQ ID NO: 35708
  source 1..80: mol_type = other DNA

SEQ ID NO: 69805 - DNA, 80 bp, synthetic construct; identical to SEQ ID NO: 35709
  source 1..80: mol_type = other DNA

SEQ ID NO: 69806 - DNA, 80 bp, synthetic construct; identical to SEQ ID NO: 35710
  source 1..80: mol_type = other DNA

SEQ ID NO: 69807 - DNA, 80 bp, synthetic construct; identical to SEQ ID NO: 12814
  source 1..80: mol_type = other DNA

SEQ ID NO: 69808 - DNA, 80 bp, synthetic construct; identical to SEQ ID NO: 35712
  source 1..80: mol_type = other DNA

SEQ ID NO: 69809 - DNA, 80 bp, synthetic construct; identical to SEQ ID NO: 35713
  source 1..80: mol_type = other DNA

SEQ ID NO: 69810 - DNA, 80 bp, synthetic construct; identical to SEQ ID NO: 12815
  source 1..80: mol_type = other DNA

SEQ ID NO: 69811 - DNA, 80 bp, synthetic construct; identical to SEQ ID NO: 35715
  source 1..80: mol_type = other DNA

SEQ ID NO: 69812 - DNA, 80 bp, synthetic construct; identical to SEQ ID NO: 35716
  source 1..80: mol_type = other DNA

SEQ ID NO: 69813 - DNA, 80 bp, synthetic construct; identical to SEQ ID NO: 35717
  source 1..80: mol_type = other DNA

SEQ ID NO: 69814 - DNA, 80 bp, synthetic construct; identical to SEQ ID NO: 12816
  source 1..80: mol_type = other DNA

SEQ ID NO: 69815 - DNA, 80 bp, synthetic construct; identical to SEQ ID NO: 35719
  source 1..80: mol_type = other DNA

SEQ ID NO: 69816 - DNA, 80 bp, synthetic construct; identical to SEQ ID NO: 35720
  source 1..80: mol_type = other DNA

SEQ ID NO: 69817 - DNA, 80 bp, synthetic construct; identical to SEQ ID NO: 35721
  source 1..80: mol_type = other DNA

SEQ ID NO: 69818 - DNA, 80 bp, synthetic construct; identical to SEQ ID NO: 35722
  source 1..80: mol_type = other DNA

SEQ ID NO: 69819 - DNA, 80 bp, synthetic construct; identical to SEQ ID NO: 12817
  source 1..80: mol_type = other DNA

SEQ ID NO: 69820 - DNA, 80 bp, synthetic construct; identical to SEQ ID NO: 35724
  source 1..80: mol_type = other DNA

SEQ ID NO: 69821 - DNA, 80 bp, synthetic construct; identical to SEQ ID NO: 35725
  source 1..80: mol_type = other DNA

SEQ ID NO: 69822 - DNA, 80 bp, synthetic construct; identical to SEQ ID NO: 35726
  source 1..80: mol_type = other DNA

SEQ ID NO: 69823 - DNA, 80 bp, synthetic construct; identical to SEQ ID NO: 12818
  source 1..80: mol_type = other DNA

SEQ ID NO: 69824 - DNA, 80 bp, synthetic construct; identical to SEQ ID NO: 35728
  source 1..80: mol_type = other DNA

SEQ ID NO: 69825 - DNA, 80 bp, synthetic construct; identical to SEQ ID NO: 35729
  source 1..80: mol_type = other DNA

SEQ ID NO: 69826 - DNA, 80 bp, synthetic construct; identical to SEQ ID NO: 12819
  source 1..80: mol_type = other DNA

SEQ ID NO: 69827 - DNA, 80 bp, synthetic construct; identical to SEQ ID NO: 35731
  source 1..80: mol_type = other DNA

SEQ ID NO: 69828 - DNA, 80 bp, synthetic construct; identical to SEQ ID NO: 35732
  source 1..80: mol_type = other DNA

SEQ ID NO: 69829 - DNA, 80 bp, synthetic construct; identical to SEQ ID NO: 35733
  source 1..80: mol_type = other DNA

SEQ ID NO: 69830 - DNA, 80 bp, synthetic construct; identical to SEQ ID NO: 35734
  source 1..80: mol_type = other DNA

SEQ ID NO: 69831 - DNA, 80 bp, synthetic construct; identical to SEQ ID NO: 12820
  source 1..80: mol_type = other DNA

SEQ ID NO: 69832 - DNA, 80 bp, synthetic construct; identical to SEQ ID NO: 35736
  source 1..80: mol_type = other DNA

SEQ ID NO: 69833 - DNA, 80 bp, synthetic construct; identical to SEQ ID NO: 35737
  source 1..80: mol_type = other DNA

SEQ ID NO: 69834 - DNA, 80 bp, synthetic construct; identical to SEQ ID NO: 35738
  source 1..80: mol_type = other DNA

SEQ ID NO: 69835 - DNA, 80 bp, synthetic construct; identical to SEQ ID NO: 12821
  source 1..80: mol_type = other DNA

SEQ ID NO: 69836 - DNA, 80 bp, synthetic construct; identical to SEQ ID NO: 35740
  source 1..80: mol_type = other DNA

SEQ ID NO: 69837 - DNA, 80 bp, synthetic construct; identical to SEQ ID NO: 35741
  source 1..80: mol_type = other DNA

SEQ ID NO: 69838 - DNA, 80 bp, synthetic construct; identical to SEQ ID NO: 12822
  source 1..80: mol_type = other DNA

SEQ ID NO: 69839 - DNA, 80 bp, synthetic construct; identical to SEQ ID NO: 35743
  source 1..80: mol_type = other DNA

SEQ ID NO: 69840 - DNA, 80 bp, synthetic construct; identical to SEQ ID NO: 35744
  source 1..80: mol_type = other DNA

SEQ ID NO: 69841 - DNA, 80 bp, synthetic construct; identical to SEQ ID NO: 35745
  source 1..80: mol_type = other DNA

SEQ ID NO: 69842 - DNA, 80 bp, synthetic construct; identical to SEQ ID NO: 35746
  source 1..80: mol_type = other DNA

SEQ ID NO: 69843 - DNA, 80 bp, synthetic construct; identical to SEQ ID NO: 12823
  source 1..80: mol_type = other DNA

SEQ ID NO: 69844 - DNA, 80 bp, synthetic construct; identical to SEQ ID NO: 35748
  source 1..80: mol_type = other DNA

SEQ ID NO: 69845 - DNA, 80 bp, synthetic construct; identical to SEQ ID NO: 35749
  source 1..80: mol_type = other DNA

SEQ ID NO: 69846 - DNA, 80 bp, synthetic construct; identical to SEQ ID NO: 35750
  source 1..80: mol_type = other DNA

SEQ ID NO: 69847 - DNA, 80 bp, synthetic construct; identical to SEQ ID NO: 35751
  source 1..80: mol_type = other DNA

SEQ ID NO: 69848 - DNA, 80 bp, synthetic construct; identical to SEQ ID NO: 12824
  source 1..80: mol_type = other DNA

SEQ ID NO: 69849 - DNA, 80 bp, synthetic construct; identical to SEQ ID NO: 35754
  source 1..80: mol_type = other DNA

SEQ ID NO: 69850 - DNA, 80 bp, synthetic construct; identical to SEQ ID NO: 12825
  source 1..80: mol_type = other DNA

SEQ ID NO: 69851 - DNA, 80 bp, synthetic construct; identical to SEQ ID NO: 35756
  source 1..80: mol_type = other DNA

SEQ ID NO: 69852 - DNA, 80 bp, synthetic construct; identical to SEQ ID NO: 35757
  source 1..80: mol_type = other DNA

SEQ ID NO: 69853 - DNA, 80 bp, synthetic construct; identical to SEQ ID NO: 35758
  source 1..80: mol_type = other DNA

SEQ ID NO: 69854 - DNA, 80 bp, synthetic construct; identical to SEQ ID NO: 35759
  source 1..80: mol_type = other DNA

SEQ ID NO: 69855 - DNA, 80 bp, synthetic construct; identical to SEQ ID NO: 12826
  source 1..80: mol_type = other DNA

SEQ ID NO: 69856 - DNA, 80 bp, synthetic construct; identical to SEQ ID NO: 35761
  source 1..80: mol_type = other DNA

SEQ ID NO: 69857 - DNA, 80 bp, synthetic construct; identical to SEQ ID NO: 35763
  source 1..80: mol_type = other DNA

SEQ ID NO: 69858 - DNA, 80 bp, synthetic construct; identical to SEQ ID NO: 12827
  source 1..80: mol_type = other DNA

SEQ ID NO: 69859 - DNA, 80 bp, synthetic construct; identical to SEQ ID NO: 35765
  source 1..80: mol_type = other DNA

SEQ ID NO: 69860 - DNA, 80 bp, synthetic construct; identical to SEQ ID NO: 35766
  source 1..80: mol_type = other DNA

SEQ ID NO: 69861 - DNA, 80 bp, synthetic construct; identical to SEQ ID NO: 35767
  source 1..80: mol_type = other DNA

SEQ ID NO: 69862 - DNA, 80 bp, synthetic construct; identical to SEQ ID NO: 12828
  source 1..80: mol_type = other DNA

SEQ ID NO: 69863 - DNA, 80 bp, synthetic construct; identical to SEQ ID NO: 35769
  source 1..80: mol_type = other DNA

SEQ ID NO: 69864 - DNA, 80 bp, synthetic construct; identical to SEQ ID NO: 35770
  source 1..80: mol_type = other DNA

SEQ ID NO: 69865 - DNA, 80 bp, synthetic construct; identical to SEQ ID NO: 12829
  source 1..80: mol_type = other DNA

SEQ ID NO: 69866 - DNA, 80 bp, synthetic construct; identical to SEQ ID NO: 35773
  source 1..80: mol_type = other DNA

SEQ ID NO: 69867 - DNA, 80 bp, synthetic construct; identical to SEQ ID NO: 35774
  source 1..80: mol_type = other DNA

SEQ ID NO: 69868 - DNA, 80 bp, synthetic construct; identical to SEQ ID NO: 12830
  source 1..80: mol_type = other DNA

SEQ ID NO: 69869 - DNA, 80 bp, synthetic construct; identical to SEQ ID NO: 35776
  source 1..80: mol_type = other DNA

SEQ ID NO: 69870 - DNA, 80 bp, synthetic construct; identical to SEQ ID NO: 35777
  source 1..80: mol_type = other DNA

SEQ ID NO: 69871 - DNA, 80 bp, synthetic construct; identical to SEQ ID NO: 35778
  source 1..80: mol_type = other DNA

SEQ ID NO: 69872 - DNA, 80 bp, synthetic construct; identical to SEQ ID NO: 12831
  source 1..80: mol_type = other DNA

SEQ ID NO: 69873 - DNA, 80 bp, synthetic construct; identical to SEQ ID NO: 35780
  source 1..80: mol_type = other DNA

SEQ ID NO: 69874 - DNA, 80 bp, synthetic construct; identical to SEQ ID NO: 35781
  source 1..80: mol_type = other DNA

SEQ ID NO: 69875 - DNA, 80 bp, synthetic construct; identical to SEQ ID NO: 35782
  source 1..80: mol_type = other DNA

SEQ ID NO: 69876 - DNA, 80 bp, synthetic construct; identical to SEQ ID NO: 12832
  source 1..80: mol_type = other DNA

SEQ ID NO: 69877 - DNA, 80 bp, synthetic construct; identical to SEQ ID NO: 35784
  source 1..80: mol_type = other DNA

SEQ ID NO: 69878 - DNA, 80 bp, synthetic construct; identical to SEQ ID NO: 35785
  source 1..80: mol_type = other DNA

SEQ ID NO: 69879 - DNA, 80 bp, synthetic construct; identical to SEQ ID NO: 35786
  source 1..80: mol_type = other DNA

SEQ ID NO: 69880 - DNA, 80 bp, synthetic construct; identical to SEQ ID NO: 35787
  source 1..80: mol_type = other DNA

SEQ ID NO: 69881 - DNA, 80 bp, synthetic construct; identical to SEQ ID NO: 12833
  source 1..80: mol_type = other DNA

SEQ ID NO: 69882 - DNA, 80 bp, synthetic construct; identical to SEQ ID NO: 35789
  source 1..80: mol_type = other DNA

SEQ ID NO: 69883 - DNA, 80 bp, synthetic construct; identical to SEQ ID NO: 35790
  source 1..80: mol_type = other DNA

SEQ ID NO: 69884 - DNA, 80 bp, synthetic construct; identical to SEQ ID NO: 12834
  source 1..80: mol_type = other DNA

SEQ ID NO: 69885 - DNA, 80 bp, synthetic construct; identical to SEQ ID NO: 35794
  source 1..80: mol_type = other DNA

SEQ ID NO: 69886 - DNA, 80 bp, synthetic construct; identical to SEQ ID NO: 12835
  source 1..80: mol_type = other DNA

SEQ ID NO: 69887 - DNA, 80 bp, synthetic construct; identical to SEQ ID NO: 35797
  source 1..80: mol_type = other DNA

SEQ ID NO: 69888 - DNA, 80 bp, synthetic construct; identical to SEQ ID NO: 35798
  source 1..80: mol_type = other DNA

SEQ ID NO: 69889 - DNA, 80 bp, synthetic construct; identical to SEQ ID NO: 12836
  source 1..80: mol_type = other DNA

SEQ ID NO: 69890 - DNA, 80 bp, synthetic construct; identical to SEQ ID NO: 35800
  source 1..80: mol_type = other DNA

SEQ ID NO: 69891 - DNA, 80 bp, synthetic construct; identical to SEQ ID NO: 35801
  source 1..80: mol_type = other DNA

SEQ ID NO: 69892 - DNA, 80 bp, synthetic construct; identical to SEQ ID NO: 35802
  source 1..80: mol_type = other DNA

SEQ ID NO: 69893 - DNA, 80 bp, synthetic construct; identical to SEQ ID NO: 12837
  source 1..80: mol_type = other DNA

SEQ ID NO: 69894 - DNA, 80 bp, synthetic construct; identical to SEQ ID NO: 35804
  source 1..80: mol_type = other DNA

SEQ ID NO: 69895 - DNA, 80 bp, synthetic construct; identical to SEQ ID NO: 35805
  source 1..80: mol_type = other DNA

SEQ ID NO: 69896 - DNA, 80 bp, synthetic construct; identical to SEQ ID NO: 35806
  source 1..80: mol_type = other DNA

SEQ ID NO: 69897 - DNA, 80 bp, synthetic construct; identical to SEQ ID NO: 35807
  source 1..80: mol_type = other DNA

SEQ ID NO: 69898 - DNA, 80 bp, synthetic construct; identical to SEQ ID NO: 35808
  source 1..80: mol_type = other DNA

SEQ ID NO: 69899 - DNA, 80 bp, synthetic construct; identical to SEQ ID NO: 12838
  source 1..80: mol_type = other DNA

SEQ ID NO: 69900 - DNA, 80 bp, synthetic construct; identical to SEQ ID NO: 35810
  source 1..80: mol_type = other DNA

SEQ ID NO: 69901 - DNA, 80 bp, synthetic construct; identical to SEQ ID NO: 35811
  source 1..80: mol_type = other DNA

SEQ ID NO: 69902 - DNA, 80 bp, synthetic construct; identical to SEQ ID NO: 35812
  source 1..80: mol_type = other DNA

SEQ ID NO: 69903 - DNA, 80 bp, synthetic construct; identical to SEQ ID NO: 12839
  source 1..80: mol_type = other DNA

SEQ ID NO: 69904 - DNA, 80 bp, synthetic construct; identical to SEQ ID NO: 35814
  source 1..80: mol_type = other DNA

SEQ ID NO: 69905 - DNA, 80 bp, synthetic construct; identical to SEQ ID NO: 35815
  source 1..80: mol_type = other DNA

SEQ ID NO: 69906 - DNA, 80 bp, synthetic construct; identical to SEQ ID NO: 35816
  source 1..80: mol_type = other DNA

SEQ ID NO: 69907 - DNA, 80 bp, synthetic construct; identical to SEQ ID NO: 12840
  source 1..80: mol_type = other DNA

SEQ ID NO: 69908 - DNA, 80 bp, synthetic construct; identical to SEQ ID NO: 35818
  source 1..80: mol_type = other DNA

SEQ ID NO: 69909 - DNA, 80 bp, synthetic construct; identical to SEQ ID NO: 35819
  source 1..80: mol_type = other DNA

SEQ ID NO: 69910 - DNA, 80 bp, synthetic construct; identical to SEQ ID NO: 35820
  source 1..80: mol_type = other DNA

SEQ ID NO: 69911 - DNA, 80 bp, synthetic construct; identical to SEQ ID NO: 35821
  source 1..80: mol_type = other DNA

SEQ ID NO: 69912 - DNA, 80 bp, synthetic construct; identical to SEQ ID NO: 12841
  source 1..80: mol_type = other DNA

SEQ ID NO: 69913 - DNA, 80 bp, synthetic construct; identical to SEQ ID NO: 35823
  source 1..80: mol_type = other DNA

SEQ ID NO: 69914 - DNA, 80 bp, synthetic construct; identical to SEQ ID NO: 35824
  source 1..80: mol_type = other DNA

SEQ ID NO: 69915 - DNA, 80 bp, synthetic construct; identical to SEQ ID NO: 35825
  source 1..80: mol_type = other DNA

SEQ ID NO: 69916 - DNA, 80 bp, synthetic construct; identical to SEQ ID NO: 12842
  source 1..80: mol_type = other DNA

SEQ ID NO: 69917 - DNA, 80 bp, synthetic construct; identical to SEQ ID NO: 35827
  source 1..80: mol_type = other DNA

SEQ ID NO: 69918 - DNA, 80 bp, synthetic construct; identical to SEQ ID NO: 35828
  source 1..80: mol_type = other DNA

SEQ ID NO: 69919 - DNA, 80 bp, synthetic construct; identical to SEQ ID NO: 12843
  source 1..80: mol_type = other DNA

SEQ ID NO: 69920 - DNA, 80 bp, synthetic construct; identical to SEQ ID NO: 35830
  source 1..80: mol_type = other DNA

SEQ ID NO: 69921 - DNA, 80 bp, synthetic construct; identical to SEQ ID NO: 35831
  source 1..80: mol_type = other DNA

SEQ ID NO: 69922 - DNA, 80 bp, synthetic construct; identical to SEQ ID NO: 35832
  source 1..80: mol_type = other DNA

SEQ ID NO: 69923 - DNA, 80 bp, synthetic construct; identical to SEQ ID NO: 12844
  source 1..80: mol_type = other DNA

SEQ ID NO: 69924 - DNA, 80 bp, synthetic construct; identical to SEQ ID NO: 35835
  source 1..80: mol_type = other DNA

SEQ ID NO: 69925 - DNA, 80 bp, synthetic construct; identical to SEQ ID NO: 35836
  source 1..80: mol_type = other DNA

SEQ ID NO: 69926 - DNA, 80 bp, synthetic construct; identical to SEQ ID NO: 35837
  source 1..80: mol_type = other DNA

SEQ ID NO: 69927 - DNA, 80 bp, synthetic construct; identical to SEQ ID NO: 12845
  source 1..80: mol_type = other DNA

SEQ ID NO: 69928 - DNA, 80 bp, synthetic construct; identical to SEQ ID NO: 35839
  source 1..80: mol_type = other DNA

SEQ ID NO: 69929 - DNA, 80 bp, synthetic construct; identical to SEQ ID NO: 35840
  source 1..80: mol_type = other DNA

SEQ ID NO: 69930 - DNA, 80 bp, synthetic construct; identical to SEQ ID NO: 35841
  source 1..80: mol_type = other DNA

SEQ ID NO: 69931 - DNA, 80 bp, synthetic construct; identical to SEQ ID NO: 12846
  source 1..80: mol_type = other DNA

SEQ ID NO: 69932 - DNA, 80 bp, synthetic construct; identical to SEQ ID NO: 35843
  source 1..80: mol_type = other DNA

SEQ ID NO: 69933 - DNA, 80 bp, synthetic construct; identical to SEQ ID NO: 35844
  source 1..80: mol_type = other DNA

SEQ ID NO: 69934 - DNA, 80 bp, synthetic construct; identical to SEQ ID NO: 35845
  source 1..80: mol_type = other DNA

SEQ ID NO: 69935 - DNA, 80 bp, synthetic construct; identical to SEQ ID NO: 12847
  source 1..80: mol_type = other DNA

SEQ ID NO: 69936 - DNA, 80 bp, synthetic construct; identical to SEQ ID NO: 35847
  source 1..80: mol_type = other DNA

SEQ ID NO: 69937 - DNA, 80 bp, synthetic construct; identical to SEQ ID NO: 35848
  source 1..80: mol_type = other DNA

SEQ ID NO: 69938 - DNA, 80 bp, synthetic construct; identical to SEQ ID NO: 35849
  source 1..80: mol_type = other DNA

SEQ ID NO: 69939 - DNA, 80 bp, synthetic construct; identical to SEQ ID NO: 12848
  source 1..80: mol_type = other DNA

SEQ ID NO: 69940 - DNA, 80 bp, synthetic construct; identical to SEQ ID NO: 35851
  source 1..80: mol_type = other DNA

SEQ ID NO: 69941 - DNA, 80 bp, synthetic construct; identical to SEQ ID NO: 35852
  source 1..80: mol_type = other DNA

SEQ ID NO: 69942 - DNA, 80 bp, synthetic construct; identical to SEQ ID NO: 12849
  source 1..80: mol_type = other DNA

SEQ ID NO: 69943 - DNA, 80 bp, synthetic construct; identical to SEQ ID NO: 35854
  source 1..80: mol_type = other DNA

SEQ ID NO: 69944 - DNA, 80 bp, synthetic construct; identical to SEQ ID NO: 35855
  source 1..80: mol_type = other DNA

SEQ ID NO: 69945 - DNA, 80 bp, synthetic construct; identical to SEQ ID NO: 35856
  source 1..80: mol_type = other DNA

SEQ ID NO: 69946 - DNA, 80 bp, synthetic construct; identical to SEQ ID NO: 35857
  source 1..80: mol_type = other DNA

SEQ ID NO: 69947 - DNA, 80 bp, synthetic construct; identical to SEQ ID NO: 12850
  source 1..80: mol_type = other DNA

SEQ ID NO: 69948 - DNA, 80 bp, synthetic construct; identical to SEQ ID NO: 35859
  source 1..80: mol_type = other DNA

SEQ ID NO: 69949 - DNA, 80 bp, synthetic construct; identical to SEQ ID NO: 35860
  source 1..80: mol_type = other DNA

SEQ ID NO: 69950 - DNA, 80 bp, synthetic construct; identical to SEQ ID NO: 35861
  source 1..80: mol_type = other DNA

SEQ ID NO: 69951 - DNA, 80 bp, synthetic construct; identical to SEQ ID NO: 12851
  source 1..80: mol_type = other DNA

SEQ ID NO: 69952 - DNA, 80 bp, synthetic construct; identical to SEQ ID NO: 35863
  source 1..80: mol_type = other DNA

SEQ ID NO: 69953 - DNA, 80 bp, synthetic construct; identical to SEQ ID NO: 35864
  source 1..80: mol_type = other DNA

SEQ ID NO: 69954 - DNA, 80 bp, synthetic construct; identical to SEQ ID NO: 35865
  source 1..80: mol_type = other DNA

SEQ ID NO: 69955 - DNA, 80 bp, synthetic construct; identical to SEQ ID NO: 12852
  source 1..80: mol_type = other DNA

SEQ ID NO: 69956 - DNA, 80 bp, synthetic construct; identical to SEQ ID NO: 35867
  source 1..80: mol_type = other DNA

SEQ ID NO: 69957 - DNA, 80 bp, synthetic construct; identical to SEQ ID NO: 35868
  source 1..80: mol_type = other DNA

SEQ ID NO: 69958 - DNA, 80 bp, synthetic construct; identical to SEQ ID NO: 35869
  source 1..80: mol_type = other DNA

SEQ ID NO: 69959 - DNA, 80 bp, synthetic construct; identical to SEQ ID NO: 12853
  source 1..80: mol_type = other DNA

SEQ ID NO: 69960 - DNA, 80 bp, synthetic construct; identical to SEQ ID NO: 35871
  source 1..80: mol_type = other DNA

SEQ ID NO: 69961 - DNA, 80 bp, synthetic construct; identical to SEQ ID NO: 35872
  source 1..80: mol_type = other DNA

SEQ ID NO: 69962 - DNA, 80 bp, synthetic construct; identical to SEQ ID NO: 12854
  source 1..80: mol_type = other DNA

SEQ ID NO: 69963 - DNA, 80 bp, synthetic construct; identical to SEQ ID NO: 35874
  source 1..80: mol_type = other DNA

SEQ ID NO: 69964 - DNA, 80 bp, synthetic construct; identical to SEQ ID NO: 35876
  source 1..80: mol_type = other DNA

SEQ ID NO: 69965 - DNA, 80 bp, synthetic construct; identical to SEQ ID NO: 12855
  source 1..80: mol_type = other DNA

SEQ ID NO: 69966 - DNA, 80 bp, synthetic construct; identical to SEQ ID NO: 35878
  source 1..80: mol_type = other DNA

SEQ ID NO: 69967 - DNA, 80 bp, synthetic construct; identical to SEQ ID NO: 35879
  source 1..80: mol_type = other DNA

SEQ ID NO: 69968 - DNA, 80 bp, synthetic construct; identical to SEQ ID NO: 35880
  source 1..80: mol_type = other DNA

SEQ ID NO: 69969 - DNA, 80 bp, synthetic construct; identical to SEQ ID NO: 12856
  source 1..80: mol_type = other DNA

SEQ ID NO: 69970 - DNA, 80 bp, synthetic construct; identical to SEQ ID NO: 35882
  source 1..80: mol_type = other DNA

SEQ ID NO: 69971 - DNA, 80 bp, synthetic construct; identical to SEQ ID NO: 35883
  source 1..80: mol_type = other DNA

SEQ ID NO: 69972 - DNA, 80 bp, synthetic construct; identical to SEQ ID NO: 35884
  source 1..80: mol_type = other DNA

SEQ ID NO: 69973 - DNA, 80 bp, synthetic construct; identical to SEQ ID NO: 12857
  source 1..80: mol_type = other DNA

SEQ ID NO: 69974 - DNA, 80 bp, synthetic construct; identical to SEQ ID NO: 35886
  source 1..80: mol_type = other DNA

SEQ ID NO: 69975 - DNA, 80 bp, synthetic construct; identical to SEQ ID NO: 35887
  source 1..80: mol_type = other DNA

SEQ ID NO: 69976 - DNA, 80 bp, synthetic construct; identical to SEQ ID NO: 35888
  source 1..80: mol_type = other DNA

SEQ ID NO: 69977 - DNA, 80 bp, synthetic construct; identical to SEQ ID NO: 35889
  source 1..80: mol_type = other DNA

SEQ ID NO: 69978 - DNA, 80 bp, synthetic construct; identical to SEQ ID NO: 12858
  source 1..80: mol_type = other DNA

SEQ ID NO: 69979 - DNA, 80 bp, synthetic construct; identical to SEQ ID NO: 35891
  source 1..80: mol_type = other DNA

SEQ ID NO: 69980 - DNA, 80 bp, synthetic construct; identical to SEQ ID NO: 35892
  source 1..80: mol_type = other DNA

SEQ ID NO: 69981 - DNA, 80 bp, synthetic construct; identical to SEQ ID NO: 35893
  source 1..80: mol_type = other DNA

SEQ ID NO: 69982 - DNA, 80 bp, synthetic construct; identical to SEQ ID NO: 12859
  source 1..80: mol_type = other DNA

SEQ ID NO: 69983 - DNA, 80 bp, synthetic construct; identical to SEQ ID NO: 35895
  source 1..80: mol_type = other DNA

SEQ ID NO: 69984 - DNA, 80 bp, synthetic construct; identical to SEQ ID NO: 35896
  source 1..80: mol_type = other DNA

SEQ ID NO: 69985 - DNA, 80 bp, synthetic construct; identical to SEQ ID NO: 12860
  source 1..80: mol_type = other DNA

SEQ ID NO: 69986 - DNA, 80 bp, synthetic construct; identical to SEQ ID NO: 35898
  source 1..80: mol_type = other DNA

SEQ ID NO: 69987 - DNA, 80 bp, synthetic construct; identical to SEQ ID NO: 35899
  source 1..80: mol_type = other DNA

SEQ ID NO: 69988 - DNA, 80 bp, synthetic construct; identical to SEQ ID NO: 35900
  source 1..80: mol_type = other DNA

SEQ ID NO: 69989 - DNA, 80 bp, synthetic construct; identical to SEQ ID NO: 35901
  source 1..80: mol_type = other DNA

SEQ ID NO: 69990 - DNA, 80 bp, synthetic construct; identical to SEQ ID NO: 12861
  source 1..80: mol_type = other DNA

SEQ ID NO: 69991 - DNA, 80 bp, synthetic construct; identical to SEQ ID NO: 35903
  source 1..80: mol_type = other DNA

SEQ ID NO: 69992 - DNA, 80 bp, synthetic construct; identical to SEQ ID NO: 35904
  source 1..80: mol_type = other DNA

SEQ ID NO: 69993 - DNA, 80 bp, synthetic construct; identical to SEQ ID NO: 12862
  source 1..80: mol_type = other DNA

SEQ ID NO: 69994 - DNA, 80 bp, synthetic construct; identical to SEQ ID NO: 35906
  source 1..80: mol_type = other DNA

SEQ ID NO: 69995 - DNA, 80 bp, synthetic construct; identical to SEQ ID NO: 35907
  source 1..80: mol_type = other DNA

SEQ ID NO: 69996 - DNA, 80 bp, synthetic construct; identical to SEQ ID NO: 35908
  source 1..80: mol_type = other DNA

SEQ ID NO: 69997 - DNA, 80 bp, synthetic construct; identical to SEQ ID NO: 12863
  source 1..80: mol_type = other DNA

SEQ ID NO: 69998 - DNA, 80 bp, synthetic construct; identical to SEQ ID NO: 35910
  source 1..80: mol_type = other DNA

SEQ ID NO: 69999 - DNA, 80 bp, synthetic construct; identical to SEQ ID NO: 35911
  source 1..80: mol_type = other DNA

SEQ ID NO: 70000 - DNA, 80 bp, synthetic construct; identical to SEQ ID NO: 35912
  source 1..80: mol_type = other DNA

SEQ ID NO: 70001 - DNA, 80 bp, synthetic construct; identical to SEQ ID NO: 35913
  source 1..80: mol_type = other DNA

SEQ ID NO: 70002 - DNA, 80 bp, synthetic construct; identical to SEQ ID NO: 12864
  source 1..80: mol_type = other DNA

SEQ ID NO: 70003 - DNA, 80 bp, synthetic construct; identical to SEQ ID NO: 35915
  source 1..80: mol_type = other DNA

SEQ ID NO: 70004 - DNA, 80 bp, synthetic construct; identical to SEQ ID NO: 35916
  source 1..80: mol_type = other DNA

SEQ ID NO: 70005 - DNA, 80 bp, synthetic construct; identical to SEQ ID NO: 35917
  source 1..80: mol_type = other DNA

SEQ ID NO: 70006 - DNA, 80 bp, synthetic construct; identical to SEQ ID NO: 12865
  source 1..80: mol_type = other DNA

SEQ ID NO: 70007 - DNA, 80 bp, synthetic construct; identical to SEQ ID NO: 35919
  source 1..80: mol_type = other DNA

SEQ ID NO: 70008 - DNA, 80 bp, synthetic construct; identical to SEQ ID NO: 35920
  source 1..80: mol_type = other DNA

SEQ ID NO: 70009 - DNA, 80 bp, synthetic construct; identical to SEQ ID NO: 12866
  source 1..80: mol_type = other DNA

SEQ ID NO: 70010 - DNA, 80 bp, synthetic construct; identical to SEQ ID NO: 35922
  source 1..80: mol_type = other DNA

SEQ ID NO: 70011 - DNA, 80 bp, synthetic construct; identical to SEQ ID NO: 35923
  source 1..80: mol_type = other DNA

SEQ ID NO: 70012 - DNA, 80 bp, synthetic construct; identical to SEQ ID NO: 35924
  source 1..80: mol_type = other DNA

SEQ ID NO: 70013 - DNA, 80 bp, synthetic construct; identical to SEQ ID NO: 35925
  source 1..80: mol_type = other DNA

SEQ ID NO: 70014 - DNA, 80 bp, synthetic construct; identical to SEQ ID NO: 12867
  source 1..80: mol_type = other DNA

SEQ ID NO: 70015 - DNA, 80 bp, synthetic construct; identical to SEQ ID NO: 35927
  source 1..80: mol_type = other DNA

SEQ ID NO: 70016 - DNA, 80 bp, synthetic construct; identical to SEQ ID NO: 35928
  source 1..80: mol_type = other DNA

SEQ ID NO: 70017 - DNA, 80 bp, synthetic construct; identical to SEQ ID NO: 35929
  source 1..80: mol_type = other DNA

SEQ ID NO: 70018 - DNA, 80 bp, synthetic construct; identical to SEQ ID NO: 12868
  source 1..80: mol_type = other DNA

SEQ ID NO: 70019 - DNA, 80 bp, synthetic construct; identical to SEQ ID NO: 35931
  source 1..80: mol_type = other DNA

SEQ ID NO: 70020 - DNA, 80 bp, synthetic construct; identical to SEQ ID NO: 35932
  source 1..80: mol_type = other DNA

SEQ ID NO: 70021 - DNA, 80 bp, synthetic construct; identical to SEQ ID NO: 12869
  source 1..80: mol_type = other DNA

SEQ ID NO: 70022 - DNA, 80 bp, synthetic construct; identical to SEQ ID NO: 35934
  source 1..80: mol_type = other DNA

SEQ ID NO: 70023 - DNA, 80 bp, synthetic construct; identical to SEQ ID NO: 35935
  source 1..80: mol_type = other DNA

SEQ ID NO: 70024 - DNA, 80 bp, synthetic construct; identical to SEQ ID NO: 35936
  source 1..80: mol_type = other DNA

SEQ ID NO: 70025 - DNA, 80 bp, synthetic construct; identical to SEQ ID NO: 35937
  source 1..80: mol_type = other DNA

SEQ ID NO: 70026 - DNA, 80 bp, synthetic construct; identical to SEQ ID NO: 12870
  source 1..80: mol_type = other DNA

SEQ ID NO: 70027 - DNA, 80 bp, synthetic construct; identical to SEQ ID NO: 35939
  source 1..80: mol_type = other DNA

SEQ ID NO: 70028 - DNA, 80 bp, synthetic construct; identical to SEQ ID NO: 35940
  source 1..80: mol_type = other DNA

SEQ ID NO: 70029 - DNA, 80 bp, synthetic construct; identical to SEQ ID NO: 35941
  source 1..80: mol_type = other DNA

SEQ ID NO: 70030 - DNA, 80 bp, synthetic construct; identical to SEQ ID NO: 12871
  source 1..80: mol_type = other DNA

SEQ ID NO: 70031 - DNA, 80 bp, synthetic construct; identical to SEQ ID NO: 35943
  source 1..80: mol_type = other DNA

SEQ ID NO: 70032 - DNA, 80 bp, synthetic construct; identical to SEQ ID NO: 35944
  source 1..80: mol_type = other DNA

SEQ ID NO: 70033 - DNA, 80 bp, synthetic construct; identical to SEQ ID NO: 12872
  source 1..80: mol_type = other DNA

SEQ ID NO: 70034 - DNA, 80 bp, synthetic construct; identical to SEQ ID NO: 35946
  source 1..80: mol_type = other DNA

SEQ ID NO: 70035 - DNA, 80 bp, synthetic construct; identical to SEQ ID NO: 35947
  source 1..80: mol_type = other DNA

SEQ ID NO: 70036 - DNA, 80 bp, synthetic construct; identical to SEQ ID NO: 35948
  source 1..80: mol_type = other DNA

SEQ ID NO: 70037 - DNA, 80 bp, synthetic construct; identical to SEQ ID NO: 12873
  source 1..80: mol_type = other DNA

SEQ ID NO: 70038 - DNA, 80 bp, synthetic construct; identical to SEQ ID NO: 35950
  source 1..80: mol_type = other DNA

SEQ ID NO: 70039 - DNA, 80 bp, synthetic construct; identical to SEQ ID NO: 35951
  source 1..80: mol_type = other DNA

SEQ ID NO: 70040 - DNA, 80 bp, synthetic construct; identical to SEQ ID NO: 35952
  source 1..80: mol_type = other DNA

SEQ ID NO: 70041 - DNA, 80 bp, synthetic construct; identical to SEQ ID NO: 12874
  source 1..80: mol_type = other DNA

SEQ ID NO: 70042 - DNA, 80 bp, synthetic construct; identical to SEQ ID NO: 35954
  source 1..80: mol_type = other DNA

SEQ ID NO: 70043 - DNA, 80 bp, synthetic construct; identical to SEQ ID NO: 35955
  source 1..80: mol_type = other DNA

SEQ ID NO: 70044 - DNA, 80 bp, synthetic construct; identical to SEQ ID NO: 35956
  source 1..80: mol_type = other DNA

SEQ ID NO: 70045 - DNA, 80 bp, synthetic construct; identical to SEQ ID NO: 12875
  source 1..80: mol_type = other DNA

SEQ ID NO: 70046 - DNA, 80 bp, synthetic construct; identical to SEQ ID NO: 35958
  source 1..80: mol_type = other DNA

SEQ ID NO: 70047 - DNA, 80 bp, synthetic construct; identical to SEQ ID NO: 35959
  source 1..80: mol_type = other DNA

SEQ ID NO: 70048 - DNA, 80 bp, synthetic construct; identical to SEQ ID NO: 35960
  source 1..80: mol_type = other DNA

SEQ ID NO: 70049 - DNA, 80 bp, synthetic construct; identical to SEQ ID NO: 35961
  source 1..80: mol_type = other DNA

SEQ ID NO: 70050 - DNA, 80 bp, synthetic construct; identical to SEQ ID NO: 12876
  source 1..80: mol_type = other DNA

SEQ ID NO: 70051 - DNA, 80 bp, synthetic construct; identical to SEQ ID NO: 35963
  source 1..80: mol_type = other DNA

SEQ ID NO: 70052 - DNA, 80 bp, synthetic construct; identical to SEQ ID NO: 35964
  source 1..80: mol_type = other DNA

SEQ ID NO: 70053 - DNA, 80 bp, synthetic construct; identical to SEQ ID NO: 35965
  source 1..80: mol_type = other DNA

SEQ ID NO: 70054 - DNA, 80 bp, synthetic construct; identical to SEQ ID NO: 12877
  source 1..80: mol_type = other DNA

SEQ ID NO: 70055 - DNA, 80 bp, synthetic construct; identical to SEQ ID NO: 35967
  source 1..80: mol_type = other DNA

SEQ ID NO: 70056 - DNA, 80 bp, synthetic construct; identical to SEQ ID NO: 35968
  source 1..80: mol_type = other DNA

SEQ ID NO: 70057 - DNA, 80 bp, synthetic construct; identical to SEQ ID NO: 35969
  source 1..80: mol_type = other DNA

SEQ ID NO: 70058 - DNA, 80 bp, synthetic construct; identical to SEQ ID NO: 12878
  source 1..80: mol_type = other DNA

SEQ ID NO: 70059 - DNA, 80 bp, synthetic construct; identical to SEQ ID NO: 35971
  source 1..80: mol_type = other DNA

SEQ ID NO: 70060 - DNA, 80 bp, synthetic construct; identical to SEQ ID NO: 35972
  source 1..80: mol_type = other DNA

SEQ ID NO: 70061 - DNA, 80 bp, synthetic construct; identical to SEQ ID NO: 35973
  source 1..80: mol_type = other DNA

SEQ ID NO: 70062 - DNA, 80 bp, synthetic construct; identical to SEQ ID NO: 35974
  source 1..80: mol_type = other DNA

SEQ ID NO: 70063 - DNA, 80 bp, synthetic construct; identical to SEQ ID NO: 12879
  source 1..80: mol_type = other DNA

SEQ ID NO: 70064 - DNA, 80 bp, synthetic construct; identical to SEQ ID NO: 35976
  source 1..80: mol_type = other DNA

SEQ ID NO: 70065 - DNA, 80 bp, synthetic construct; identical to SEQ ID NO: 35977
  source 1..80: mol_type = other DNA

SEQ ID NO: 70066 - DNA, 80 bp, synthetic construct; identical to SEQ ID NO: 35978
  source 1..80: mol_type = other DNA

SEQ ID NO: 70067 - DNA, 80 bp, synthetic construct; identical to SEQ ID NO: 12880
  source 1..80: mol_type = other DNA

SEQ ID NO: 70068 - DNA, 80 bp, synthetic construct; identical to SEQ ID NO: 35980
  source 1..80: mol_type = other DNA

SEQ ID NO: 70069 - DNA, 80 bp, synthetic construct; identical to SEQ ID NO: 35981
  source 1..80: mol_type = other DNA

SEQ ID NO: 70070 - DNA, 80 bp, synthetic construct; identical to SEQ ID NO: 12881
  source 1..80: mol_type = other DNA

SEQ ID NO: 70071 - DNA, 80 bp, synthetic construct; identical to SEQ ID NO: 35983
  source 1..80: mol_type = other DNA

SEQ ID NO: 70072 - DNA, 80 bp, synthetic construct; identical to SEQ ID NO: 35984
  source 1..80: mol_type = other DNA

SEQ ID NO: 70073 - DNA, 80 bp, synthetic construct; identical to SEQ ID NO: 35985
  source 1..80: mol_type = other DNA

SEQ ID NO: 70074 - DNA, 80 bp, synthetic construct; identical to SEQ ID NO: 12882
  source 1..80: mol_type = other DNA

SEQ ID NO: 70075 - DNA, 80 bp, synthetic construct; identical to SEQ ID NO: 35987
  source 1..80: mol_type = other DNA

SEQ ID NO: 70076 - DNA, 80 bp, synthetic construct; identical to SEQ ID NO: 35988
  source 1..80: mol_type = other DNA

SEQ ID NO: 70077 - DNA, 80 bp, synthetic construct; identical to SEQ ID NO: 35989
  source 1..80: mol_type = other DNA

SEQ ID NO: 70078 - DNA, 80 bp, synthetic construct; identical to SEQ ID NO: 35990
  source 1..80: mol_type = other DNA

SEQ ID NO: 70079 - DNA, 80 bp, synthetic construct; identical to SEQ ID NO: 12883
  source 1..80: mol_type = other DNA

SEQ ID NO: 70080 - DNA, 80 bp, synthetic construct; identical to SEQ ID NO: 35992
  source 1..80: mol_type = other DNA

SEQ ID NO: 70081 - DNA, 80 bp, synthetic construct; identical to SEQ ID NO: 35993
  source 1..80: mol_type = other DNA

SEQ ID NO: 70082 - DNA, 80 bp, synthetic construct; identical to SEQ ID NO: 12884
  source 1..80: mol_type = other DNA

SEQ ID NO: 70083 - DNA, 80 bp, synthetic construct; identical to SEQ ID NO: 35995
  source 1..80: mol_type = other DNA

SEQ ID NO: 70084 - DNA, 80 bp, synthetic construct; identical to SEQ ID NO: 35996
  source 1..80: mol_type = other DNA

SEQ ID NO: 70085 - DNA, 80 bp, synthetic construct; identical to SEQ ID NO: 35997
  source 1..80: mol_type = other DNA

SEQ ID NO: 70086 - DNA, 80 bp, synthetic construct; identical to SEQ ID NO: 35998
  source 1..80: mol_type = other DNA

SEQ ID NO: 70087 - DNA, 80 bp, synthetic construct; identical to SEQ ID NO: 12885
  source 1..80: mol_type = other DNA

SEQ ID NO: 70088 - DNA, 80 bp, synthetic construct; identical to SEQ ID NO: 36000
  source 1..80: mol_type = other DNA

SEQ ID NO: 70089 - DNA, 80 bp, synthetic construct; identical to SEQ ID NO: 36001
  source 1..80: mol_type = other DNA

SEQ ID NO: 70090 - DNA, 80 bp, synthetic construct; identical to SEQ ID NO: 12886
  source 1..80: mol_type = other DNA

SEQ ID NO: 70091 - DNA, 80 bp, synthetic construct; identical to SEQ ID NO: 36003
  source 1..80: mol_type = other DNA

SEQ ID NO: 70092 - DNA, 80 bp, synthetic construct; identical to SEQ ID NO: 36004
  source 1..80: mol_type = other DNA

SEQ ID NO: 70093 - DNA, 80 bp, synthetic construct; identical to SEQ ID NO: 36005
  source 1..80: mol_type = other DNA

SEQ ID NO: 70094 - DNA, 80 bp, synthetic construct; identical to SEQ ID NO: 12887
  source 1..80: mol_type = other DNA

SEQ ID NO: 70095 - DNA, 80 bp, synthetic construct; identical to SEQ ID NO: 36007
  source 1..80: mol_type = other DNA

SEQ ID NO: 70096 - DNA, 80 bp, synthetic construct; identical to SEQ ID NO: 36008
  source 1..80: mol_type = other DNA

SEQ ID NO: 70097 - DNA, 80 bp, synthetic construct; identical to SEQ ID NO: 36009
  source 1..80: mol_type = other DNA

SEQ ID NO: 70098 - DNA, 80 bp, synthetic construct; identical to SEQ ID NO: 36010
  source 1..80: mol_type = other DNA

SEQ ID NO: 70099 - DNA, 80 bp, synthetic construct; identical to SEQ ID NO: 36011
  source 1..80: mol_type = other DNA

SEQ ID NO: 70100 - DNA, 80 bp, synthetic construct; identical to SEQ ID NO: 12888
  source 1..80: mol_type = other DNA

SEQ ID NO: 70101 - DNA, 80 bp, synthetic construct; identical to SEQ ID NO: 36013
  source 1..80: mol_type = other DNA

SEQ ID NO: 70102 - DNA, 80 bp, synthetic construct; identical to SEQ ID NO: 36014
  source 1..80: mol_type = other DNA

SEQ ID NO: 70103 - DNA, 80 bp, synthetic construct; identical to SEQ ID NO: 36015
  source 1..80: mol_type = other DNA

SEQ ID NO: 70104 - DNA, 80 bp, synthetic construct; identical to SEQ ID NO: 12889
  source 1..80: mol_type = other DNA

SEQ ID NO: 70105 - DNA, 80 bp, synthetic construct; identical to SEQ ID NO: 36017
  source 1..80: mol_type = other DNA

SEQ ID NO: 70106 - DNA, 80 bp, synthetic construct; identical to SEQ ID NO: 36018
  source 1..80: mol_type = other DNA

SEQ ID NO: 70107 - DNA, 80 bp, synthetic construct; identical to SEQ ID NO: 12890
  source 1..80: mol_type = other DNA

SEQ ID NO: 70108 - DNA, 80 bp, synthetic construct; identical to SEQ ID NO: 36020
  source 1..80: mol_type = other DNA

SEQ ID NO: 70109 - DNA, 80 bp, synthetic construct; identical to SEQ ID NO: 36021
  source 1..80: mol_type = other DNA

SEQ ID NO: 70110 - DNA, 80 bp, synthetic construct; identical to SEQ ID NO: 36022
  source 1..80: mol_type = other DNA

SEQ ID NO: 70111 - DNA, 80 bp, synthetic construct; identical to SEQ ID NO: 12891
  source 1..80: mol_type = other DNA

SEQ ID NO: 70112 - DNA, 80 bp, synthetic construct; identical to SEQ ID NO: 36024
  source 1..80: mol_type = other DNA

SEQ ID NO: 70113 - DNA, 80 bp, synthetic construct; identical to SEQ ID NO: 36025
  source 1..80: mol_type = other DNA

SEQ ID NO: 70114 - DNA, 80 bp, synthetic construct; identical to SEQ ID NO: 12892
  source 1..80: mol_type = other DNA

SEQ ID NO: 70115 - DNA, 80 bp, synthetic construct; identical to SEQ ID NO: 36028
  source 1..80: mol_type = other DNA

SEQ ID NO: 70116 - DNA, 80 bp, synthetic construct; identical to SEQ ID NO: 36029
  source 1..80: mol_type = other DNA

SEQ ID NO: 70117 - DNA, 80 bp, synthetic construct; identical to SEQ ID NO: 36030
  source 1..80: mol_type = other DNA

SEQ ID NO: 70118 - DNA, 80 bp, synthetic construct; identical to SEQ ID NO: 36031
  source 1..80: mol_type = other DNA

SEQ ID NO: 70119 - DNA, 80 bp, synthetic construct; identical to SEQ ID NO: 36032
  source 1..80: mol_type = other DNA

SEQ ID NO: 70120 - DNA, 80 bp, synthetic construct; identical to SEQ ID NO: 12893
  source 1..80: mol_type = other DNA

SEQ ID NO: 70121 - DNA, 80 bp, synthetic construct; identical to SEQ ID NO: 36034
  source 1..80: mol_type = other DNA

SEQ ID NO: 70122 - DNA, 80 bp, synthetic construct; identical to SEQ ID NO: 36035
  source 1..80: mol_type = other DNA

SEQ ID NO: 70123 - DNA, 80 bp, synthetic construct; identical to SEQ ID NO: 36036
  source 1..80: mol_type = other DNA

SEQ ID NO: 70124 - DNA, 80 bp, synthetic construct; identical to SEQ ID NO: 12894
  source 1..80: mol_type = other DNA

SEQ ID NO: 70125 - DNA, 80 bp, synthetic construct; identical to SEQ ID NO: 36038
  source 1..80: mol_type = other DNA

SEQ ID NO: 70126 - DNA, 80 bp, synthetic construct; identical to SEQ ID NO: 36039
  source 1..80: mol_type = other DNA

SEQ ID NO: 70127 - DNA, 80 bp, synthetic construct; identical to SEQ ID NO: 36040
  source 1..80: mol_type = other DNA

SEQ ID NO: 70128 - DNA, 80 bp, synthetic construct; identical to SEQ ID NO: 12895
  source 1..80: mol_type = other DNA

SEQ ID NO: 70129 - DNA, 80 bp, synthetic construct; identical to SEQ ID NO: 36042
  source 1..80: mol_type = other DNA

SEQ ID NO: 70130 - DNA, 80 bp, synthetic construct; identical to SEQ ID NO: 36043
  source 1..80: mol_type = other DNA

SEQ ID NO: 70131 - DNA, 80 bp, synthetic construct; identical to SEQ ID NO: 36044
  source 1..80: mol_type = other DNA

SEQ ID NO: 70132 - DNA, 80 bp, synthetic construct; identical to SEQ ID NO: 12896
  source 1..80: mol_type = other DNA

SEQ ID NO: 70133 - DNA, 80 bp, synthetic construct; identical to SEQ ID NO: 36046
  source 1..80: mol_type = other DNA

SEQ ID NO: 70134 - DNA, 80 bp, synthetic construct; identical to SEQ ID NO: 36047
  source 1..80: mol_type = other DNA

SEQ ID NO: 70135 - DNA, 80 bp, synthetic construct; identical to SEQ ID NO: 36048
  source 1..80: mol_type = other DNA

SEQ ID NO: 70136 - DNA, 80 bp, synthetic construct; identical to SEQ ID NO: 36049
  source 1..80: mol_type = other DNA

SEQ ID NO: 70137 - DNA, 80 bp, synthetic construct; identical to SEQ ID NO: 12897
  source 1..80: mol_type = other DNA

SEQ ID NO: 70138 - DNA, 80 bp, synthetic construct; identical to SEQ ID NO: 36051
  source 1..80: mol_type = other DNA

SEQ ID NO: 70139 - DNA, 80 bp, synthetic construct; identical to SEQ ID NO: 36052
  source 1..80: mol_type = other DNA

SEQ ID NO: 70140 - DNA, 80 bp, synthetic construct; identical to SEQ ID NO: 36053
  source 1..80: mol_type = other DNA

SEQ ID NO: 70141 - DNA, 80 bp, synthetic construct; identical to SEQ ID NO: 12898
  source 1..80: mol_type = other DNA

SEQ ID NO: 70142 - DNA, 80 bp, synthetic construct; identical to SEQ ID NO: 36055
  source 1..80: mol_type = other DNA

SEQ ID NO: 70143 - DNA, 80 bp, synthetic construct; identical to SEQ ID NO: 36056
  source 1..80: mol_type = other DNA

SEQ ID NO: 70144 - DNA, 80 bp, synthetic construct; identical to SEQ ID NO: 36057
  source 1..80: mol_type = other DNA

SEQ ID NO: 70145 - DNA, 80 bp, synthetic construct; identical to SEQ ID NO: 12899
  source 1..80: mol_type = other DNA

SEQ ID NO: 70146 - DNA, 80 bp, synthetic construct; identical to SEQ ID NO: 36060
  source 1..80: mol_type = other DNA

SEQ ID NO: 70147 - DNA, 80 bp, synthetic construct; identical to SEQ ID NO: 36061
  source 1..80: mol_type = other DNA

SEQ ID NO: 70148 - DNA, 80 bp, synthetic construct; identical to SEQ ID NO: 36062
  source 1..80: mol_type = other DNA

SEQ ID NO: 70149 - DNA, 80 bp, synthetic construct; identical to SEQ ID NO: 12900
  source 1..80: mol_type = other DNA

SEQ ID NO: 70150 - DNA, 80 bp, synthetic construct; identical to SEQ ID NO: 36064
  source 1..80: mol_type = other DNA

SEQ ID NO: 70151 - DNA, 80 bp, synthetic construct; identical to SEQ ID NO: 36065
  source 1..80: mol_type = other DNA

SEQ ID NO: 70152 - DNA, 80 bp, synthetic construct; identical to SEQ ID NO: 36066
  source 1..80: mol_type = other DNA

SEQ ID NO: 70153 - DNA, 80 bp, synthetic construct; identical to SEQ ID NO: 12901
  source 1..80: mol_type = other DNA

SEQ ID NO: 70154 - DNA, 80 bp, synthetic construct; identical to SEQ ID NO: 36068
  source 1..80: mol_type = other DNA

SEQ ID NO: 70155 - DNA, 80 bp, synthetic construct; identical to SEQ ID NO: 36069
  source 1..80: mol_type = other DNA

SEQ ID NO: 70156 - DNA, 80 bp, synthetic construct; identical to SEQ ID NO: 12902
  source 1..80: mol_type = other DNA

SEQ ID NO: 70157 - DNA, 80 bp, synthetic construct; identical to SEQ ID NO: 36071
  source 1..80: mol_type = other DNA

SEQ ID NO: 70158 - DNA, 80 bp, synthetic construct; identical to SEQ ID NO: 36072
  source 1..80: mol_type = other DNA

SEQ ID NO: 70159 - DNA, 80 bp, synthetic construct; identical to SEQ ID NO: 36073
  source 1..80: mol_type = other DNA

SEQ ID NO: 70160 - DNA, 80 bp, synthetic construct; identical to SEQ ID NO: 12903
  source 1..80: mol_type = other DNA

SEQ ID NO: 70161 - DNA, 80 bp, synthetic construct; identical to SEQ ID NO: 36075
  source 1..80: mol_type = other DNA

SEQ ID NO: 70162 - DNA, 80 bp, synthetic construct; identical to SEQ ID NO: 36076
  source 1..80: mol_type = other DNA

SEQ ID NO: 70163 - DNA, 80 bp, synthetic construct; identical to SEQ ID NO: 36077
  source 1..80: mol_type = other DNA

SEQ ID NO: 70164 - DNA, 80 bp, synthetic construct; identical to SEQ ID NO: 12904
  source 1..80: mol_type = other DNA

SEQ ID NO: 70165 - DNA, 80 bp, synthetic construct; identical to SEQ ID NO: 36079
  source 1..80: mol_type = other DNA

SEQ ID NO: 70166 - DNA, 80 bp, synthetic construct; identical to SEQ ID NO: 36080
  source 1..80: mol_type = other DNA

SEQ ID NO: 70167 - DNA, 80 bp, synthetic construct; identical to SEQ ID NO: 36081
  source 1..80: mol_type = other DNA

SEQ ID NO: 70168 - DNA, 80 bp, synthetic construct; identical to SEQ ID NO: 12905
  source 1..80: mol_type = other DNA

SEQ ID NO: 70169 - DNA, 80 bp, synthetic construct; identical to SEQ ID NO: 36083
  source 1..80: mol_type = other DNA

SEQ ID NO: 70170 - DNA, 80 bp, synthetic construct; identical to SEQ ID NO: 36084
  source 1..80: mol_type = other DNA

SEQ ID NO: 70171 - DNA, 80 bp, synthetic construct; identical to SEQ ID NO: 36085
  source 1..80: mol_type = other DNA

SEQ ID NO: 70172 - DNA, 80 bp, synthetic construct; identical to SEQ ID NO: 36086
  source 1..80: mol_type = other DNA

SEQ ID NO: 70173 - DNA, 80 bp, synthetic construct; identical to SEQ ID NO: 12906
  source 1..80: mol_type = other DNA

SEQ ID NO: 70174 - DNA, 80 bp, synthetic construct; identical to SEQ ID NO: 36088
  source 1..80: mol_type = other DNA

SEQ ID NO: 70175 - DNA, 80 bp, synthetic construct; identical to SEQ ID NO: 36089
  source 1..80: mol_type = other DNA

SEQ ID NO: 70176 - DNA, 80 bp, synthetic construct; identical to SEQ ID NO: 36090
  source 1..80: mol_type = other DNA

SEQ ID NO: 70177 - DNA, 80 bp, synthetic construct; identical to SEQ ID NO: 12907
  source 1..80: mol_type = other DNA

SEQ ID NO: 70178 - DNA, 80 bp, synthetic construct; identical to SEQ ID NO: 36092
  source 1..80: mol_type = other DNA

SEQ ID NO: 70179 - DNA, 80 bp, synthetic construct; identical to SEQ ID NO: 36093
  source 1..80: mol_type = other DNA

SEQ ID NO: 70180 - DNA, 80 bp, synthetic construct; identical to SEQ ID NO: 36094
  source 1..80: mol_type = other DNA

SEQ ID NO: 70181 - DNA, 80 bp, synthetic construct; identical to SEQ ID NO: 12908
  source 1..80: mol_type = other DNA

SEQ ID NO: 70182 - DNA, 80 bp, synthetic construct; identical to SEQ ID NO: 36096
  source 1..80: mol_type = other DNA

SEQ ID NO: 70183 - DNA, 80 bp, synthetic construct; identical to SEQ ID NO: 36097
  source 1..80: mol_type = other DNA

SEQ ID NO: 70184 - DNA, 80 bp, synthetic construct; identical to SEQ ID NO: 36098
  source 1..80: mol_type = other DNA

SEQ ID NO: 70185 - DNA, 80 bp, synthetic construct; identical to SEQ ID NO: 12909
  source 1..80: mol_type = other DNA

SEQ ID NO: 70186 - DNA, 80 bp, synthetic construct; identical to SEQ ID NO: 36100
  source 1..80: mol_type = other DNA

SEQ ID NO: 70187 - DNA, 80 bp, synthetic construct; identical to SEQ ID NO: 36101
  source 1..80: mol_type = other DNA

SEQ ID NO: 70188 - DNA, 80 bp, synthetic construct; identical to SEQ ID NO: 36102
  source 1..80: mol_type = other DNA

SEQ ID NO: 70189 - DNA, 80 bp, synthetic construct; identical to SEQ ID NO: 36103
  source 1..80: mol_type = other DNA

SEQ ID NO: 70190 - DNA, 80 bp, synthetic construct; identical to SEQ ID NO: 12910
  source 1..80: mol_type = other DNA

SEQ ID NO: 70191 - DNA, 80 bp, synthetic construct; identical to SEQ ID NO: 36105
  source 1..80: mol_type = other DNA

SEQ ID NO: 70192 - DNA, 80 bp, synthetic construct; identical to SEQ ID NO: 36106
  source 1..80: mol_type = other DNA

SEQ ID NO: 70193 - DNA, 80 bp, synthetic construct; identical to SEQ ID NO: 36107
  source 1..80: mol_type = other DNA

SEQ ID NO: 70194 - DNA, 80 bp, synthetic construct; identical to SEQ ID NO: 12911
  source 1..80: mol_type = other DNA

SEQ ID NO: 70195 - DNA, 80 bp, synthetic construct; identical to SEQ ID NO: 36109
  source 1..80: mol_type = other DNA

SEQ ID NO: 70196 - DNA, 80 bp, synthetic construct; identical to SEQ ID NO: 36110
  source 1..80: mol_type = other DNA

SEQ ID NO: 70197 - DNA, 80 bp, synthetic construct; identical to SEQ ID NO: 12912
  source 1..80: mol_type = other DNA

SEQ ID NO: 70198 - DNA, 80 bp, synthetic construct; identical to SEQ ID NO: 36112
  source 1..80: mol_type = other DNA

SEQ ID NO: 70199 - DNA, 80 bp, synthetic construct; identical to SEQ ID NO: 36113
  source 1..80: mol_type = other DNA

SEQ ID NO: 70200 - DNA, 80 bp, synthetic construct; identical to SEQ ID NO: 36114
  source 1..80: mol_type = other DNA

SEQ ID NO: 70201 - DNA, 80 bp, synthetic construct; identical to SEQ ID NO: 36115
  source 1..80: mol_type = other DNA

SEQ ID NO: 70202 - DNA, 80 bp, synthetic construct; identical to SEQ ID NO: 12913
  source 1..80: mol_type = other DNA

SEQ ID NO: 70203 - DNA, 80 bp, synthetic construct; identical to SEQ ID NO: 36117
  source 1..80: mol_type = other DNA

SEQ ID NO: 70204 - DNA, 80 bp, synthetic construct; identical to SEQ ID NO: 36118
  source 1..80: mol_type = other DNA

SEQ ID NO: 70205 - DNA, 80 bp, synthetic construct; identical to SEQ ID NO: 36119
  source 1..80: mol_type = other DNA

SEQ ID NO: 70206 - DNA, 80 bp, synthetic construct; identical to SEQ ID NO: 12914
  source 1..80: mol_type = other DNA

SEQ ID NO: 70207 - DNA, 80 bp, synthetic construct; identical to SEQ ID NO: 36121
  source 1..80: mol_type = other DNA

SEQ ID NO: 70208 - DNA, 80 bp, synthetic construct; identical to SEQ ID NO: 36122
  source 1..80: mol_type = other DNA

SEQ ID NO: 70209 - DNA, 80 bp, synthetic construct; identical to SEQ ID NO: 36123
  source 1..80: mol_type = other DNA

SEQ ID NO: 70210 - DNA, 80 bp, synthetic construct; identical to SEQ ID NO: 12915
  source 1..80: mol_type = other DNA

SEQ ID NO: 70211 - DNA, 80 bp, synthetic construct; identical to SEQ ID NO: 36125
  source 1..80: mol_type = other DNA

SEQ ID NO: 70212 - DNA, 80 bp, synthetic construct; identical to SEQ ID NO: 36126
  source 1..80: mol_type = other DNA

SEQ ID NO: 70213 - DNA, 80 bp, synthetic construct; identical to SEQ ID NO: 36127
  source 1..80: mol_type = other DNA

SEQ ID NO: 70214 - DNA, 80 bp, synthetic construct; identical to SEQ ID NO: 12916
  source 1..80: mol_type = other DNA

SEQ ID NO: 70215 - DNA, 80 bp, synthetic construct; identical to SEQ ID NO: 36129
  source 1..80: mol_type = other DNA

SEQ ID NO: 70216 - DNA, 80 bp, synthetic construct; identical to SEQ ID NO: 36130
  source 1..80: mol_type = other DNA

SEQ ID NO: 70217 - DNA, 80 bp, synthetic construct; identical to SEQ ID NO: 36131
  source 1..80: mol_type = other DNA

SEQ ID NO: 70218 - DNA, 80 bp, synthetic construct; identical to SEQ ID NO: 12917
  source 1..80: mol_type = other DNA

SEQ ID NO: 70219 - DNA, 80 bp, synthetic construct; identical to SEQ ID NO: 36133
  source 1..80: mol_type = other DNA

SEQ ID NO: 70220 - DNA, 80 bp, synthetic construct; identical to SEQ ID NO: 36134
  source 1..80: mol_type = other DNA

SEQ ID NO: 70221 - DNA, 80 bp, synthetic construct; identical to SEQ ID NO: 36135
  source 1..80: mol_type = other DNA

SEQ ID NO: 70222 - DNA, 80 bp, synthetic construct; identical to SEQ ID NO: 36136
  source 1..80: mol_type = other DNA

SEQ ID NO: 70223 - DNA, 80 bp, synthetic construct; identical to SEQ ID NO: 12918
  source 1..80: mol_type = other DNA

SEQ ID NO: 70224 - DNA, 80 bp, synthetic construct; identical to SEQ ID NO: 36138
  source 1..80: mol_type = other DNA

SEQ ID NO: 70225 - DNA, 80 bp, synthetic construct; identical to SEQ ID NO: 36139
  source 1..80: mol_type = other DNA

SEQ ID NO: 70226 - DNA, 80 bp, synthetic construct; identical to SEQ ID NO: 36140
  source 1..80: mol_type = other DNA

SEQ ID NO: 70227 - DNA, 80 bp, synthetic construct; identical to SEQ ID NO: 12919
  source 1..80: mol_type = other DNA

SEQ ID NO: 70228 - DNA, 80 bp, synthetic construct; identical to SEQ ID NO: 36142
  source 1..80: mol_type = other DNA

SEQ ID NO: 70229 - DNA, 80 bp, synthetic construct; identical to SEQ ID NO: 36143
  source 1..80: mol_type = other DNA

SEQ ID NO: 70230 - DNA, 80 bp, synthetic construct; identical to SEQ ID NO: 12920
  source 1..80: mol_type = other DNA

SEQ ID NO: 70231 - DNA, 80 bp, synthetic construct; identical to SEQ ID NO: 36145
  source 1..80: mol_type = other DNA

SEQ ID NO: 70232 - DNA, 80 bp, synthetic construct; identical to SEQ ID NO: 36146
  source 1..80: mol_type = other DNA

SEQ ID NO: 70233 - DNA, 80 bp, synthetic construct; identical to SEQ ID NO: 36147
  source 1..80: mol_type = other DNA

SEQ ID NO: 70234 - DNA, 80 bp, synthetic construct; identical to SEQ ID NO: 12921
  source 1..80: mol_type = other DNA

SEQ ID NO: 70235 - DNA, 80 bp, synthetic construct; identical to SEQ ID NO: 36149
  source 1..80: mol_type = other DNA

SEQ ID NO: 70236 - DNA, 80 bp, synthetic construct; identical to SEQ ID NO: 36150
  source 1..80: mol_type = other DNA

SEQ ID NO: 70237 - DNA, 80 bp, synthetic construct; identical to SEQ ID NO: 36151
  source 1..80: mol_type = other DNA

SEQ ID NO: 70238 - DNA, 80 bp, synthetic construct; identical to SEQ ID NO: 12922
  source 1..80: mol_type = other DNA

SEQ ID NO: 70239 - DNA, 80 bp, synthetic construct; identical to SEQ ID NO: 36153
  source 1..80: mol_type = other DNA

SEQ ID NO: 70240 - DNA, 80 bp, synthetic construct; identical to SEQ ID NO: 36154
  source 1..80: mol_type = other DNA

SEQ ID NO: 70241 - DNA, 80 bp, synthetic construct; identical to SEQ ID NO: 36155
  source 1..80: mol_type = other DNA

SEQ ID NO: 70242 - DNA, 80 bp, synthetic construct; identical to SEQ ID NO: 36156
  source 1..80: mol_type = other DNA

SEQ ID NO: 70243 - DNA, 80 bp, synthetic construct; identical to SEQ ID NO: 12923
  source 1..80: mol_type = other DNA

SEQ ID NO: 70244 - DNA, 80 bp, synthetic construct; identical to SEQ ID NO: 36158
  source 1..80: mol_type = other DNA

SEQ ID NO: 70245 - DNA, 80 bp, synthetic construct; identical to SEQ ID NO: 36159
  source 1..80: mol_type = other DNA

SEQ ID NO: 70246 - DNA, 80 bp, synthetic construct; identical to SEQ ID NO: 36160
  source 1..80: mol_type = other DNA

SEQ ID NO: 70247 - DNA, 80 bp, synthetic construct; identical to SEQ ID NO: 12924
  source 1..80: mol_type = other DNA

SEQ ID NO: 70248 - DNA, 80 bp, synthetic construct; identical to SEQ ID NO: 36162
  source 1..80: mol_type = other DNA

SEQ ID NO: 70249 - DNA, 80 bp, synthetic construct; identical to SEQ ID NO: 36163
  source 1..80: mol_type = other DNA

SEQ ID NO: 70250 - DNA, 80 bp, synthetic construct; identical to SEQ ID NO: 36164
  source 1..80: mol_type = other DNA

SEQ ID NO: 70251 - DNA, 80 bp, synthetic construct; identical to SEQ ID NO: 36165
  source 1..80: mol_type = other DNA

SEQ ID NO: 70252 - DNA, 80 bp, synthetic construct; identical to SEQ ID NO: 36166
  source 1..80: mol_type = other DNA

SEQ ID NO: 70253 - DNA, 80 bp, synthetic construct; identical to SEQ ID NO: 12925
  source 1..80: mol_type = other DNA

SEQ ID NO: 70254 - DNA, 80 bp, synthetic construct; identical to SEQ ID NO: 36168
  source 1..80: mol_type = other DNA

SEQ ID NO: 70255 - DNA, 80 bp, synthetic construct; identical to SEQ ID NO: 36169
  source 1..80: mol_type = other DNA

SEQ ID NO: 70256 - DNA, 80 bp, synthetic construct; identical to SEQ ID NO: 12926
  source 1..80: mol_type = other DNA

SEQ ID NO: 70257 - DNA, 80 bp, synthetic construct; identical to SEQ ID NO: 36171
  source 1..80: mol_type = other DNA

SEQ ID NO: 70258 - DNA, 80 bp, synthetic construct; identical to SEQ ID NO: 36172
  source 1..80: mol_type = other DNA

SEQ ID NO: 70259 - DNA, 80 bp, synthetic construct; identical to SEQ ID NO: 36173
  source 1..80: mol_type = other DNA

SEQ ID NO: 70260 - DNA, 80 bp, synthetic construct; identical to SEQ ID NO: 12927
  source 1..80: mol_type = other DNA

SEQ ID NO: 70261 - DNA, 80 bp, synthetic construct; identical to SEQ ID NO: 36175
  source 1..80: mol_type = other DNA

SEQ ID NO: 70262 - DNA, 80 bp, synthetic construct; identical to SEQ ID NO: 36176
  source 1..80: mol_type = other DNA

SEQ ID NO: 70263 - DNA, 80 bp, synthetic construct; identical to SEQ ID NO: 36177
  source 1..80: mol_type = other DNA

SEQ ID NO: 70264 - DNA, 80 bp, synthetic construct; identical to SEQ ID NO: 12928
  source 1..80: mol_type = other DNA

SEQ ID NO: 70265 - DNA, 80 bp, synthetic construct; identical to SEQ ID NO: 36179
  source 1..80: mol_type = other DNA

SEQ ID NO: 70266 - DNA, 80 bp, synthetic construct; identical to SEQ ID NO: 36181
  source 1..80: mol_type = other DNA

SEQ ID NO: 70267 - DNA, 80 bp, synthetic construct; identical to SEQ ID NO: 36182
  source 1..80: mol_type = other DNA

SEQ ID NO: 70268 - DNA, 80 bp, synthetic construct; identical to SEQ ID NO: 12929
  source 1..80: mol_type = other DNA

SEQ ID NO: 70269 - DNA, 80 bp, synthetic construct; identical to SEQ ID NO: 36184
  source 1..80: mol_type = other DNA

SEQ ID NO: 70270 - DNA, 80 bp, synthetic construct; identical to SEQ ID NO: 36185
  source 1..80: mol_type = other DNA

SEQ ID NO: 70271 - DNA, 80 bp, synthetic construct; identical to SEQ ID NO: 36186
  source 1..80: mol_type = other DNA

SEQ ID NO: 70272 - DNA, 80 bp, synthetic construct; identical to SEQ ID NO: 12930
  source 1..80: mol_type = other DNA

SEQ ID NO: 70273 - DNA, 80 bp, synthetic construct; identical to SEQ ID NO: 36188
  source 1..80: mol_type = other DNA

SEQ ID NO: 70274 - DNA, 80 bp, synthetic construct; identical to SEQ ID NO: 36189
  source 1..80: mol_type = other DNA

SEQ ID NO: 70275 - DNA, 80 bp, synthetic construct; identical to SEQ ID NO: 12931
  source 1..80: mol_type = other DNA

SEQ ID NO: 70276 - DNA, 80 bp, synthetic construct; identical to SEQ ID NO: 36191
  source 1..80: mol_type = other DNA

SEQ ID NO: 70277 - DNA, 80 bp, synthetic construct; identical to SEQ ID NO: 36192
  source 1..80: mol_type = other DNA

SEQ ID NO: 70278 - DNA, 80 bp, synthetic construct; identical to SEQ ID NO: 36193
  source 1..80: mol_type = other DNA

SEQ ID NO: 70279 - DNA, 80 bp, synthetic construct; identical to SEQ ID NO: 12932
  source 1..80: mol_type = other DNA

SEQ ID NO: 70280 - DNA, 80 bp, synthetic construct; identical to SEQ ID NO: 36195
  source 1..80: mol_type = other DNA

SEQ ID NO: 70281 - DNA, 80 bp, synthetic construct; identical to SEQ ID NO: 36196
  source 1..80: mol_type = other DNA

SEQ ID NO: 70282 - DNA, 80 bp, synthetic construct; identical to SEQ ID NO: 36197
  source 1..80: mol_type = other DNA

SEQ ID NO: 70283 - DNA, 80 bp, synthetic construct; identical to SEQ ID NO: 12933
  source 1..80: mol_type = other DNA

SEQ ID NO: 70284 - DNA, 80 bp, synthetic construct; identical to SEQ ID NO: 36199
  source 1..80: mol_type = other DNA

SEQ ID NO: 70285 - DNA, 80 bp, synthetic construct; identical to SEQ ID NO: 36200
  source 1..80: mol_type = other DNA

SEQ ID NO: 70286 - DNA, 80 bp, synthetic construct; identical to SEQ ID NO: 36201
  source 1..80: mol_type = other DNA

SEQ ID NO: 70287 - DNA, 80 bp, synthetic construct; identical to SEQ ID NO: 12934
  source 1..80: mol_type = other DNA

SEQ ID NO: 70288 - DNA, 80 bp, synthetic construct; identical to SEQ ID NO: 36203
  source 1..80: mol_type = other DNA

SEQ ID NO: 70289 - DNA, 80 bp, synthetic construct; identical to SEQ ID NO: 36204
  source 1..80: mol_type = other DNA

SEQ ID NO: 70290 - DNA, 80 bp, synthetic construct; identical to SEQ ID NO: 36205
  source 1..80: mol_type = other DNA

SEQ ID NO: 70291 - DNA, 80 bp, synthetic construct; identical to SEQ ID NO: 12935
  source 1..80: mol_type = other DNA

SEQ ID NO: 70292 - DNA, 80 bp, synthetic construct; identical to SEQ ID NO: 36207
  source 1..80: mol_type = other DNA

SEQ ID NO: 70293 - DNA, 80 bp, synthetic construct; identical to SEQ ID NO: 36208
  source 1..80: mol_type = other DNA

SEQ ID NO: 70294 - DNA, 80 bp, synthetic construct; identical to SEQ ID NO: 36209
  source 1..80: mol_type = other DNA

SEQ ID NO: 70295 - DNA, 80 bp, synthetic construct; identical to SEQ ID NO: 12936
  source 1..80: mol_type = other DNA

SEQ ID NO: 70296 - DNA, 80 bp, synthetic construct; identical to SEQ ID NO: 36211
  source 1..80: mol_type = other DNA

SEQ ID NO: 70297 - DNA, 80 bp, synthetic construct; identical to SEQ ID NO: 36212
  source 1..80: mol_type = other DNA

SEQ ID NO: 70298 - DNA, 80 bp, synthetic construct; identical to SEQ ID NO: 36213
  source 1..80: mol_type = other DNA

SEQ ID NO: 70299 - DNA, 80 bp, synthetic construct; identical to SEQ ID NO: 12937
  source 1..80: mol_type = other DNA

SEQ ID NO: 70300 - DNA, 80 bp, synthetic construct; identical to SEQ ID NO: 36215
  source 1..80: mol_type = other DNA

SEQ ID NO: 70301 - DNA, 80 bp, synthetic construct; identical to SEQ ID NO: 36216
  source 1..80: mol_type = other DNA

SEQ ID NO: 70302 - DNA, 80 bp, synthetic construct; identical to SEQ ID NO: 36217
  source 1..80: mol_type = other DNA

SEQ ID NO: 70303 - DNA, 80 bp, synthetic construct; identical to SEQ ID NO: 12938
  source 1..80: mol_type = other DNA

SEQ ID NO: 70304 - DNA, 80 bp, synthetic construct; identical to SEQ ID NO: 36219
  source 1..80: mol_type = other DNA

SEQ ID NO: 70305 - DNA, 80 bp, synthetic construct; identical to SEQ ID NO: 36220
  source 1..80: mol_type = other DNA

SEQ ID NO: 70306 - DNA, 80 bp, synthetic construct; identical to SEQ ID NO: 36221
  source 1..80: mol_type = other DNA

SEQ ID NO: 70307 - DNA, 80 bp, synthetic construct; identical to SEQ ID NO: 12939
  source 1..80: mol_type = other DNA

SEQ ID NO: 70308 - DNA, 80 bp, synthetic construct; identical to SEQ ID NO: 36223
  source 1..80: mol_type = other DNA

SEQ ID NO: 70309 - DNA, 80 bp, synthetic construct; identical to SEQ ID NO: 36224
  source 1..80: mol_type = other DNA

SEQ ID NO: 70310 - DNA, 80 bp, synthetic construct; identical to SEQ ID NO: 36225
  source 1..80: mol_type = other DNA

SEQ ID NO: 70311 - DNA, 80 bp, synthetic construct; identical to SEQ ID NO: 36226
  source 1..80: mol_type = other DNA

SEQ ID NO: 70312 - DNA, 80 bp, synthetic construct; identical to SEQ ID NO: 12940
  source 1..80: mol_type = other DNA

SEQ ID NO: 70313 - DNA, 80 bp, synthetic construct; identical to SEQ ID NO: 36228
  source 1..80: mol_type = other DNA

SEQ ID NO: 70314 - DNA, 80 bp, synthetic construct; identical to SEQ ID NO: 36229
  source 1..80: mol_type = other DNA

SEQ ID NO: 70315 - DNA, 80 bp, synthetic construct; identical to SEQ ID NO: 36230
  source 1..80: mol_type = other DNA

SEQ ID NO: 70316 - DNA, 80 bp, synthetic construct; identical to SEQ ID NO: 12941
  source 1..80: mol_type = other DNA

SEQ ID NO: 70317 - DNA, 80 bp, synthetic construct; identical to SEQ ID NO: 36233
  source 1..80: mol_type = other DNA

SEQ ID NO: 70318 - DNA, 80 bp, synthetic construct; identical to SEQ ID NO: 36234
  source 1..80: mol_type = other DNA

SEQ ID NO: 70319 - DNA, 80 bp, synthetic construct; identical to SEQ ID NO: 36235
  source 1..80: mol_type = other DNA

SEQ ID NO: 70320 - DNA, 80 bp, synthetic construct; identical to SEQ ID NO: 12942
  source 1..80: mol_type = other DNA

SEQ ID NO: 70321 - DNA, 80 bp, synthetic construct; identical to SEQ ID NO: 36237
  source 1..80: mol_type = other DNA

SEQ ID NO: 70322 - DNA, 80 bp, synthetic construct; identical to SEQ ID NO: 36238
  source 1..80: mol_type = other DNA

SEQ ID NO: 70323 - DNA, 80 bp, synthetic construct; identical to SEQ ID NO: 12943
  source 1..80: mol_type = other DNA

SEQ ID NO: 70324 - DNA, 80 bp, synthetic construct; identical to SEQ ID NO: 36240
  source 1..80: mol_type = other DNA

SEQ ID NO: 70325 - DNA, 80 bp, synthetic construct; identical to SEQ ID NO: 36241
  source 1..80: mol_type = other DNA

SEQ ID NO: 70326 - DNA, 80 bp, synthetic construct; identical to SEQ ID NO: 36242
  source 1..80: mol_type = other DNA

SEQ ID NO: 70327 - DNA, 80 bp, synthetic construct; identical to SEQ ID NO: 36243
  source 1..80: mol_type = other DNA

SEQ ID NO: 70328 - DNA, 80 bp, synthetic construct; identical to SEQ ID NO: 12944
  source 1..80: mol_type = other DNA

SEQ ID NO: 70329 - DNA, 80 bp, synthetic construct; identical to SEQ ID NO: 36245
  source 1..80: mol_type = other DNA

SEQ ID NO: 70330 - DNA, 80 bp, synthetic construct; identical to SEQ ID NO: 36246
  source 1..80: mol_type = other DNA

SEQ ID NO: 70331 - DNA, 80 bp, synthetic construct; identical to SEQ ID NO: 36247
  source 1..80: mol_type = other DNA

SEQ ID NO: 70332 - DNA, 80 bp, synthetic construct; identical to SEQ ID NO: 12945
  source 1..80: mol_type = other DNA

SEQ ID NO: 70333 - DNA, 80 bp, synthetic construct; identical to SEQ ID NO: 36249
  source 1..80: mol_type = other DNA

SEQ ID NO: 70334 - DNA, 80 bp, synthetic construct; identical to SEQ ID NO: 36250
  source 1..80: mol_type = other DNA

SEQ ID NO: 70335 - DNA, 80 bp, synthetic construct; identical to SEQ ID NO: 36251
  source 1..80: mol_type = other DNA

SEQ ID NO: 70336 - DNA, 80 bp, synthetic construct; identical to SEQ ID NO: 12946
  source 1..80: mol_type = other DNA

SEQ ID NO: 70337 - DNA, 80 bp, synthetic construct; identical to SEQ ID NO: 36253
  source 1..80: mol_type = other DNA

SEQ ID NO: 70338 - DNA, 80 bp, synthetic construct; identical to SEQ ID NO: 36254
  source 1..80: mol_type = other DNA

SEQ ID NO: 70339 - DNA, 80 bp, synthetic construct; identical to SEQ ID NO: 36255
  source 1..80: mol_type = other DNA

SEQ ID NO: 70340 - DNA, 80 bp, synthetic construct; identical to SEQ ID NO: 36256
  source 1..80: mol_type = other DNA

SEQ ID NO: 70341 - DNA, 80 bp, synthetic construct; identical to SEQ ID NO: 36257
  source 1..80: mol_type = other DNA

SEQ ID NO: 70342 - DNA, 80 bp, synthetic construct; identical to SEQ ID NO: 12947
  source 1..80: mol_type = other DNA

SEQ ID NO: 70343 - DNA, 80 bp, synthetic construct; identical to SEQ ID NO: 36259
  source 1..80: mol_type = other DNA

SEQ ID NO: 70344 - DNA, 80 bp, synthetic construct; identical to SEQ ID NO: 36260
  source 1..80: mol_type = other DNA

SEQ ID NO: 70345 - DNA, 80 bp, synthetic construct; identical to SEQ ID NO: 36261
  source 1..80: mol_type = other DNA

SEQ ID NO: 70346 - DNA, 80 bp, synthetic construct; identical to SEQ ID NO: 12948
  source 1..80: mol_type = other DNA

SEQ ID NO: 70347 - DNA, 80 bp, synthetic construct; identical to SEQ ID NO: 36263
  source 1..80: mol_type = other DNA

SEQ ID NO: 70348 - DNA, 80 bp, synthetic construct; identical to SEQ ID NO: 36264
  source 1..80: mol_type = other DNA

SEQ ID NO: 70349 - DNA, 80 bp, synthetic construct; identical to SEQ ID NO: 36265
  source 1..80: mol_type = other DNA

SEQ ID NO: 70350 - DNA, 80 bp, synthetic construct; identical to SEQ ID NO: 12949
  source 1..80: mol_type = other DNA

SEQ ID NO: 70351 - DNA, 80 bp, synthetic construct; identical to SEQ ID NO: 36267
  source 1..80: mol_type = other DNA

SEQ ID NO: 70352 - DNA, 80 bp, synthetic construct; identical to SEQ ID NO: 36268
  source 1..80: mol_type = other DNA

SEQ ID NO: 70353 - DNA, 80 bp, synthetic construct; identical to SEQ ID NO: 12950
  source 1..80: mol_type = other DNA

SEQ ID NO: 70354 - DNA, 80 bp, synthetic construct; identical to SEQ ID NO: 36270
  source 1..80: mol_type = other DNA

SEQ ID NO: 70355 - DNA, 80 bp, synthetic construct; identical to SEQ ID NO: 36271
  source 1..80: mol_type = other DNA

SEQ ID NO: 70356 - DNA, 80 bp, synthetic construct; identical to SEQ ID NO: 36272
  source 1..80: mol_type = other DNA

SEQ ID NO: 70357 - DNA, 80 bp, synthetic construct; identical to SEQ ID NO: 36273
  source 1..80: mol_type = other DNA

SEQ ID NO: 70358 - DNA, 80 bp, synthetic construct; identical to SEQ ID NO: 12951
  source 1..80: mol_type = other DNA

SEQ ID NO: 70359 - DNA, 80 bp, synthetic construct; identical to SEQ ID NO: 36275
  source 1..80: mol_type = other DNA

SEQ ID NO: 70360 - DNA, 80 bp, synthetic construct; identical to SEQ ID NO: 36276
  source 1..80: mol_type = other DNA

SEQ ID NO: 70361 - DNA, 80 bp, synthetic construct; identical to SEQ ID NO: 36277
  source 1..80: mol_type = other DNA

SEQ ID NO: 70362 - DNA, 80 bp, synthetic construct; identical to SEQ ID NO: 36278
  source 1..80: mol_type = other DNA

SEQ ID NO: 70363 - DNA, 80 bp, synthetic construct; identical to SEQ ID NO: 12952
  source 1..80: mol_type = other DNA

SEQ ID NO: 70364 - DNA, 80 bp, synthetic construct; identical to SEQ ID NO: 36280
  source 1..80: mol_type = other DNA

SEQ ID NO: 70365 - DNA, 80 bp, synthetic construct; identical to SEQ ID NO: 36281
  source 1..80: mol_type = other DNA

SEQ ID NO: 70366 - DNA, 80 bp, synthetic construct; identical to SEQ ID NO: 12953
  source 1..80: mol_type = other DNA

SEQ ID NO: 70367 - DNA, 80 bp, synthetic construct; identical to SEQ ID NO: 36283
  source 1..80: mol_type = other DNA

SEQ ID NO: 70368 - DNA, 80 bp, synthetic construct; identical to SEQ ID NO: 36284
  source 1..80: mol_type = other DNA

SEQ ID NO: 70369 - DNA, 80 bp, synthetic construct; identical to SEQ ID NO: 36286
  source 1..80: mol_type = other DNA

SEQ ID NO: 70370 - DNA, 80 bp, synthetic construct; identical to SEQ ID NO: 12954
  source 1..80: mol_type = other DNA

SEQ ID NO: 70371 - DNA, 80 bp, synthetic construct; identical to SEQ ID NO: 36288
  source 1..80: mol_type = other DNA

SEQ ID NO: 70372 - DNA, 80 bp, synthetic construct; identical to SEQ ID NO: 36289
  source 1..80: mol_type = other DNA

SEQ ID NO: 70373 - DNA, 80 bp, synthetic construct; identical to SEQ ID NO: 12955
  source 1..80: mol_type = other DNA

SEQ ID NO: 70374 - DNA, 80 bp, synthetic construct; identical to SEQ ID NO: 36291
  source 1..80: mol_type = other DNA

SEQ ID NO: 70375 - DNA, 80 bp, synthetic construct; identical to SEQ ID NO: 36292
  source 1..80: mol_type = other DNA

SEQ ID NO: 70376 - DNA, 80 bp, synthetic construct; identical to SEQ ID NO: 36293
  source 1..80: mol_type = other DNA

SEQ ID NO: 70377 - DNA, 80 bp, synthetic construct; identical to SEQ ID NO: 36294
  source 1..80: mol_type = other DNA

SEQ ID NO: 70378 - DNA, 80 bp, synthetic construct; identical to SEQ ID NO: 12956
  source 1..80: mol_type = other DNA

SEQ ID NO: 70379 - DNA, 80 bp, synthetic construct; identical to SEQ ID NO: 36296
  source 1..80: mol_type = other DNA

SEQ ID NO: 70380 - DNA, 80 bp, synthetic construct; identical to SEQ ID NO: 36297
  source 1..80: mol_type = other DNA

SEQ ID NO: 70381 - DNA, 80 bp, synthetic construct; identical to SEQ ID NO: 36298
  source 1..80: mol_type = other DNA

SEQ ID NO: 70382 - DNA, 80 bp, synthetic construct; identical to SEQ ID NO: 36299
  source 1..80: mol_type = other DNA

SEQ ID NO: 70383 - DNA, 80 bp, synthetic construct; identical to SEQ ID NO: 12957
  source 1..80: mol_type = other DNA

SEQ ID NO: 70384 - DNA, 80 bp, synthetic construct; identical to SEQ ID NO: 36301
  source 1..80: mol_type = other DNA

SEQ ID NO: 70385 - DNA, 80 bp, synthetic construct; identical to SEQ ID NO: 36302
  source 1..80: mol_type = other DNA

SEQ ID NO: 70386 - DNA, 80 bp, synthetic construct; identical to SEQ ID NO: 36303
  source 1..80: mol_type = other DNA

SEQ ID NO: 70387 - DNA, 80 bp, synthetic construct; identical to SEQ ID NO: 12958
  source 1..80: mol_type = other DNA

SEQ ID NO: 70388 - DNA, 80 bp, synthetic construct; identical to SEQ ID NO: 36305
  source 1..80: mol_type = other DNA

SEQ ID NO: 70389 - DNA, 80 bp, synthetic construct; identical to SEQ ID NO: 36306
  source 1..80: mol_type = other DNA

SEQ ID NO: 70390 - DNA, 80 bp, synthetic construct; identical to SEQ ID NO: 36307
  source 1..80: mol_type = other DNA

SEQ ID NO: 70391 - DNA, 80 bp, synthetic construct; identical to SEQ ID NO: 12959
  source 1..80: mol_type = other DNA

SEQ ID NO: 70392 - DNA, 80 bp, synthetic construct; identical to SEQ ID NO: 36309
  source 1..80: mol_type = other DNA

SEQ ID NO: 70393 - DNA, 80 bp, synthetic construct; identical to SEQ ID NO: 36310
  source 1..80: mol_type = other DNA

SEQ ID NO: 70394 - DNA, 80 bp, synthetic construct; identical to SEQ ID NO: 36311
  source 1..80: mol_type = other DNA

SEQ ID NO: 70395 - DNA, 80 bp, synthetic construct; identical to SEQ ID NO: 12960
  source 1..80: mol_type = other DNA

SEQ ID NO: 70396 - DNA, 80 bp, synthetic construct; identical to SEQ ID NO: 36313
  source 1..80: mol_type = other DNA

SEQ ID NO: 70397 - DNA, 80 bp, synthetic construct; identical to SEQ ID NO: 36314
  source 1..80: mol_type = other DNA

SEQ ID NO: 70398 - DNA, 80 bp, synthetic construct; identical to SEQ ID NO: 12961
  source 1..80: mol_type = other DNA

SEQ ID NO: 70399 - DNA, 80 bp, synthetic construct; identical to SEQ ID NO: 36316
  source 1..80: mol_type = other DNA

SEQ ID NO: 70400 - DNA, 80 bp, synthetic construct; identical to SEQ ID NO: 36317
  source 1..80: mol_type = other DNA

SEQ ID NO: 70401 - DNA, 80 bp, synthetic construct; identical to SEQ ID NO: 36318
  source 1..80: mol_type = other DNA

SEQ ID NO: 70402 - DNA, 80 bp, synthetic construct; identical to SEQ ID NO: 36319
  source 1..80: mol_type = other DNA

SEQ ID NO: 70403 - DNA, 80 bp, synthetic construct; identical to SEQ ID NO: 36320
  source 1..80: mol_type = other DNA

SEQ ID NO: 70404 - DNA, 80 bp, synthetic construct; identical to SEQ ID NO: 12962
  source 1..80: mol_type = other DNA

SEQ ID NO: 70405 - DNA, 80 bp, synthetic construct; identical to SEQ ID NO: 36322
  source 1..80: mol_type = other DNA

SEQ ID NO: 70406 - DNA, 80 bp, synthetic construct; identical to SEQ ID NO: 36323
  source 1..80: mol_type = other DNA

SEQ ID NO: 70407 - DNA, 80 bp, synthetic construct; identical to SEQ ID NO: 12963
  source 1..80: mol_type = other DNA

SEQ ID NO: 70408 - DNA, 80 bp, synthetic construct; identical to SEQ ID NO: 36325
  source 1..80: mol_type = other DNA

SEQ ID NO: 70409 - DNA, 80 bp, synthetic construct; identical to SEQ ID NO: 36326
  source 1..80: mol_type = other DNA

SEQ ID NO: 70410 - DNA, 80 bp, synthetic construct; identical to SEQ ID NO: 36327
  source 1..80: mol_type = other DNA

SEQ ID NO: 70411 - DNA, 80 bp, synthetic construct; identical to SEQ ID NO: 12964
  source 1..80: mol_type = other DNA

SEQ ID NO: 70412 - DNA, 80 bp, synthetic construct; identical to SEQ ID NO: 36329
  source 1..80: mol_type = other DNA

SEQ ID NO: 70413 - DNA, 80 bp, synthetic construct; identical to SEQ ID NO: 36331
  source 1..80: mol_type = other DNA

SEQ ID NO: 70414 - DNA, 80 bp, synthetic construct; identical to SEQ ID NO: 12965
  source 1..80: mol_type = other DNA

SEQ ID NO: 70415 - DNA, 80 bp, synthetic construct; identical to SEQ ID NO: 36333
  source 1..80: mol_type = other DNA

SEQ ID NO: 70416 - DNA, 80 bp, synthetic construct; identical to SEQ ID NO: 36334
  source 1..80: mol_type = other DNA

SEQ ID NO: 70417 - DNA, 80 bp, synthetic construct; identical to SEQ ID NO: 36335
  source 1..80: mol_type = other DNA

SEQ ID NO: 70418 - DNA, 80 bp, synthetic construct; identical to SEQ ID NO: 12966
  source 1..80: mol_type = other DNA

SEQ ID NO: 70419 - DNA, 80 bp, synthetic construct; identical to SEQ ID NO: 36337
  source 1..80: mol_type = other DNA

SEQ ID NO: 70420 - DNA, 80 bp, synthetic construct; identical to SEQ ID NO: 36338
  source 1..80: mol_type = other DNA

SEQ ID NO: 70421 - DNA, 80 bp, synthetic construct; identical to SEQ ID NO: 36339
  source 1..80: mol_type = other DNA

SEQ ID NO: 70422 - DNA, 80 bp, synthetic construct; identical to SEQ ID NO: 12967
  source 1..80: mol_type = other DNA

SEQ ID NO: 70423 - DNA, 80 bp, synthetic construct; identical to SEQ ID NO: 36341
  source 1..80: mol_type = other DNA

SEQ ID NO: 70424 - DNA, 80 bp, synthetic construct; identical to SEQ ID NO: 36342
  source 1..80: mol_type = other DNA

SEQ ID NO: 70425 - DNA, 80 bp, synthetic construct; identical to SEQ ID NO: 36343
  source 1..80: mol_type = other DNA

SEQ ID NO: 70426 - DNA, 80 bp, synthetic construct; identical to SEQ ID NO: 12968
  source 1..80: mol_type = other DNA

SEQ ID NO: 70427 - DNA, 80 bp, synthetic construct; identical to SEQ ID NO: 36345
  source 1..80: mol_type = other DNA

SEQ ID NO: 70428 - DNA, 80 bp, synthetic construct; identical to SEQ ID NO: 36346
  source 1..80: mol_type = other DNA

SEQ ID NO: 70429 - DNA, 80 bp, synthetic construct; identical to SEQ ID NO: 36347
  source 1..80: mol_type = other DNA

SEQ ID NO: 70430 - DNA, 80 bp, synthetic construct; identical to SEQ ID NO: 12969
  source 1..80: mol_type = other DNA

SEQ ID NO: 70431 - DNA, 80 bp, synthetic construct; identical to SEQ ID NO: 36349
  source 1..80: mol_type = other DNA

SEQ ID NO: 70432 - DNA, 80 bp, synthetic construct; identical to SEQ ID NO: 36350
  source 1..80: mol_type = other DNA

SEQ ID NO: 70433 - DNA, 80 bp, synthetic construct; identical to SEQ ID NO: 36351
  source 1..80: mol_type = other DNA

SEQ ID NO: 70434 - DNA, 80 bp, synthetic construct; identical to SEQ ID NO: 12970
  source 1..80: mol_type = other DNA

SEQ ID NO: 70435 - DNA, 80 bp, synthetic construct; identical to SEQ ID NO: 36353
  source 1..80: mol_type = other DNA

SEQ ID NO: 70436 - DNA, 80 bp, synthetic construct; identical to SEQ ID NO: 36354
  source 1..80: mol_type = other DNA

SEQ ID NO: 70437 - DNA, 80 bp, synthetic construct; identical to SEQ ID NO: 36355
  source 1..80: mol_type = other DNA

SEQ ID NO: 70438 - DNA, 80 bp, synthetic construct; identical to SEQ ID NO: 12971
  source 1..80: mol_type = other DNA

SEQ ID NO: 70439 - DNA, 80 bp, synthetic construct; identical to SEQ ID NO: 36357
  source 1..80: mol_type = other DNA

SEQ ID NO: 70440 - DNA, 80 bp, synthetic construct; identical to SEQ ID NO: 36358
  source 1..80: mol_type = other DNA

SEQ ID NO: 70441 - DNA, 80 bp, synthetic construct; identical to SEQ ID NO: 36359
  source 1..80: mol_type = other DNA

SEQ ID NO: 70442 - DNA, 80 bp, synthetic construct; identical to SEQ ID NO: 12972
  source 1..80: mol_type = other DNA

SEQ ID NO: 70443 - DNA, 80 bp, synthetic construct; identical to SEQ ID NO: 36361
  source 1..80: mol_type = other DNA

SEQ ID NO: 70444 - DNA, 80 bp, synthetic construct; identical to SEQ ID NO: 36362
  source 1..80: mol_type = other DNA

SEQ ID NO: 70445 - DNA, 80 bp, synthetic construct; identical to SEQ ID NO: 36363
  source 1..80: mol_type = other DNA

SEQ ID NO: 70446 - DNA, 80 bp, synthetic construct; identical to SEQ ID NO: 36364
  source 1..80: mol_type = other DNA

SEQ ID NO: 70447 - DNA, 80 bp, synthetic construct; identical to SEQ ID NO: 12973
  source 1..80: mol_type = other DNA

SEQ ID NO: 70448 - DNA, 80 bp, synthetic construct; identical to SEQ ID NO: 36366
  source 1..80: mol_type = other DNA

SEQ ID NO: 70449 - DNA, 80 bp, synthetic construct; identical to SEQ ID NO: 36367
  source 1..80: mol_type = other DNA

SEQ ID NO: 70450 - DNA, 80 bp, synthetic construct; identical to SEQ ID NO: 36368
  source 1..80: mol_type = other DNA

SEQ ID NO: 70451 - DNA, 80 bp, synthetic construct; identical to SEQ ID NO: 12974
  source 1..80: mol_type = other DNA

SEQ ID NO: 70452 - DNA, 80 bp, synthetic construct; identical to SEQ ID NO: 36370
  source 1..80: mol_type = other DNA

SEQ ID NO: 70453 - DNA, 80 bp, synthetic construct; identical to SEQ ID NO: 36371
  source 1..80: mol_type = other DNA

SEQ ID NO: 70454 - DNA, 80 bp, synthetic construct; identical to SEQ ID NO: 12975
  source 1..80: mol_type = other DNA

SEQ ID NO: 70455 - DNA, 80 bp, synthetic construct; identical to SEQ ID NO: 36373
  source 1..80: mol_type = other DNA

SEQ ID NO: 70456 - DNA, 80 bp, synthetic construct; identical to SEQ ID NO: 36374
  source 1..80: mol_type = other DNA

SEQ ID NO: 70457 - DNA, 80 bp, synthetic construct; identical to SEQ ID NO: 36375
  source 1..80: mol_type = other DNA

SEQ ID NO: 70458 - DNA, 80 bp, synthetic construct; identical to SEQ ID NO: 12976
  source 1..80: mol_type = other DNA

SEQ ID NO: 70459 - DNA, 80 bp, synthetic construct; identical to SEQ ID NO: 36377
  source 1..80: mol_type = other DNA

SEQ ID NO: 70460 - DNA, 80 bp, synthetic construct; identical to SEQ ID NO: 36378
  source 1..80: mol_type = other DNA

SEQ ID NO: 70461 - DNA, 80 bp, synthetic construct; identical to SEQ ID NO: 36379
  source 1..80: mol_type = other DNA

SEQ ID NO: 70462 - DNA, 80 bp, synthetic construct; identical to SEQ ID NO: 36380
  source 1..80: mol_type = other DNA

SEQ ID NO: 70463 - DNA, 80 bp, synthetic construct; identical to SEQ ID NO: 12977
  source 1..80: mol_type = other DNA

SEQ ID NO: 70464 - DNA, 80 bp, synthetic construct; identical to SEQ ID NO: 36382
  source 1..80: mol_type = other DNA

SEQ ID NO: 70465 - DNA, 80 bp, synthetic construct; identical to SEQ ID NO: 36383
  source 1..80: mol_type = other DNA

SEQ ID NO: 70466 - DNA, 80 bp, synthetic construct; identical to SEQ ID NO: 36384
  source 1..80: mol_type = other DNA

SEQ ID NO: 70467 - DNA, 80 bp, synthetic construct; identical to SEQ ID NO: 12978
  source 1..80: mol_type = other DNA

SEQ ID NO: 70468 - DNA, 80 bp, synthetic construct; identical to SEQ ID NO: 36387
  source 1..80: mol_type = other DNA

SEQ ID NO: 70469 - DNA, 80 bp, synthetic construct; identical to SEQ ID NO: 36388
  source 1..80: mol_type = other DNA

SEQ ID NO: 70470 - DNA, 80 bp, synthetic construct; identical to SEQ ID NO: 12979
  source 1..80: mol_type = other DNA

SEQ ID NO: 70471 - DNA, 80 bp, synthetic construct; identical to SEQ ID NO: 36390
  source 1..80: mol_type = other DNA

SEQ ID NO: 70472 - DNA, 80 bp, synthetic construct; identical to SEQ ID NO: 36391
  source 1..80: mol_type = other DNA

SEQ ID NO: 70473 - DNA, 80 bp, synthetic construct; identical to SEQ ID NO: 12980
  source 1..80: mol_type = other DNA

SEQ ID NO: 70474 - DNA, 80 bp, synthetic construct; identical to SEQ ID NO: 36393
  source 1..80: mol_type = other DNA

SEQ ID NO: 70475 - DNA, 80 bp, synthetic construct; identical to SEQ ID NO: 36394
  source 1..80: mol_type = other DNA

SEQ ID NO: 70476 - DNA, 80 bp, synthetic construct; identical to SEQ ID NO: 36395
  source 1..80: mol_type = other DNA

SEQ ID NO: 70477 - DNA, 80 bp, synthetic construct; identical to SEQ ID NO: 36396
  source 1..80: mol_type = other DNA

SEQ ID NO: 70478 - DNA, 80 bp, synthetic construct; identical to SEQ ID NO: 12981
  source 1..80: mol_type = other DNA

SEQ ID NO: 70479 - DNA, 80 bp, synthetic construct; identical to SEQ ID NO: 36398
  source 1..80: mol_type = other DNA

SEQ ID NO: 70480 - DNA, 80 bp, synthetic construct; identical to SEQ ID NO: 36399
  source 1..80: mol_type = other DNA

SEQ ID NO: 70481 - DNA, 80 bp, synthetic construct; identical to SEQ ID NO: 36400
  source 1..80: mol_type = other DNA

SEQ ID NO: 70482 - DNA, 80 bp, synthetic construct; identical to SEQ ID NO: 12982
  source 1..80: mol_type = other DNA

SEQ ID NO: 70483 - DNA, 80 bp, synthetic construct; identical to SEQ ID NO: 36402
  source 1..80: mol_type = other DNA

SEQ ID NO: 70484 - DNA, 80 bp, synthetic construct; identical to SEQ ID NO: 36403
  source 1..80: mol_type = other DNA

SEQ ID NO: 70485 - DNA, 80 bp, synthetic construct; identical to SEQ ID NO: 36404
  source 1..80: mol_type = other DNA

SEQ ID NO: 70486 - DNA, 80 bp, synthetic construct; identical to SEQ ID NO: 12983
  source 1..80: mol_type = other DNA

SEQ ID NO: 70487 - DNA, 80 bp, synthetic construct; identical to SEQ ID NO: 36406
  source 1..80: mol_type = other DNA

SEQ ID NO: 70488 - DNA, 80 bp, synthetic construct; identical to SEQ ID NO: 36407
  source 1..80: mol_type = other DNA

SEQ ID NO: 70489 - DNA, 80 bp, synthetic construct; identical to SEQ ID NO: 36408
  source 1..80: mol_type = other DNA

SEQ ID NO: 70490 - DNA, 80 bp, synthetic construct; identical to SEQ ID NO: 12984
  source 1..80: mol_type = other DNA

SEQ ID NO: 70491 - DNA, 80 bp, synthetic construct; identical to SEQ ID NO: 36410
  source 1..80: mol_type = other DNA

SEQ ID NO: 70492 - DNA, 80 bp, synthetic construct; identical to SEQ ID NO: 36411
  source 1..80: mol_type = other DNA

SEQ ID NO: 70493 - DNA, 80 bp, synthetic construct; identical to SEQ ID NO: 12985
  source 1..80: mol_type = other DNA

SEQ ID NO: 70494 - DNA, 80 bp, synthetic construct; identical to SEQ ID NO: 36413
  source 1..80: mol_type = other DNA

SEQ ID NO: 70495 - DNA, 80 bp, synthetic construct; identical to SEQ ID NO: 36414
  source 1..80: mol_type = other DNA

SEQ ID NO: 70496 - DNA, 80 bp, synthetic construct; identical to SEQ ID NO: 36415
  source 1..80: mol_type = other DNA

SEQ ID NO: 70497 - DNA, 80 bp, synthetic construct; identical to SEQ ID NO: 12986
  source 1..80: mol_type = other DNA

SEQ ID NO: 70498 - DNA, 80 bp, synthetic construct; identical to SEQ ID NO: 36417
  source 1..80: mol_type = other DNA

SEQ ID NO: 70499 - DNA, 80 bp, synthetic construct; identical to SEQ ID NO: 36418
  source 1..80: mol_type = other DNA

SEQ ID NO: 70500 - DNA, 80 bp, synthetic construct; identical to SEQ ID NO: 36419
  source 1..80: mol_type = other DNA

SEQ ID NO: 70501 - DNA, 80 bp, synthetic construct; identical to SEQ ID NO: 12987
  source 1..80: mol_type = other DNA

SEQ ID NO: 70502 - DNA, 80 bp, synthetic construct; identical to SEQ ID NO: 36422
  source 1..80: mol_type = other DNA

SEQ ID NO: 70503 - DNA, 80 bp, synthetic construct; identical to SEQ ID NO: 36423
  source 1..80: mol_type = other DNA

SEQ ID NO: 70504 - DNA, 80 bp, synthetic construct; identical to SEQ ID NO: 12988
  source 1..80: mol_type = other DNA

SEQ ID NO: 70505 - DNA, 80 bp, synthetic construct; identical to SEQ ID NO: 36425
  source 1..80: mol_type = other DNA

SEQ ID NO: 70506 - DNA, 80 bp, synthetic construct; identical to SEQ ID NO: 36426
  source 1..80: mol_type = other DNA

SEQ ID NO: 70507 - DNA, 80 bp, synthetic construct; identical to SEQ ID NO: 36427
  source 1..80: mol_type = other DNA

SEQ ID NO: 70508 - DNA, 80 bp, synthetic construct; identical to SEQ ID NO: 12989
  source 1..80: mol_type = other DNA

SEQ ID NO: 70509 - DNA, 80 bp, synthetic construct; identical to SEQ ID NO: 36430
  source 1..80: mol_type = other DNA

SEQ ID NO: 70510 - DNA, 80 bp, synthetic construct; identical to SEQ ID NO: 36431
  source 1..80: mol_type = other DNA

SEQ ID NO: 70511 - DNA, 80 bp, synthetic construct; identical to SEQ ID NO: 36432
  source 1..80: mol_type = other DNA

SEQ ID NO: 70512 - DNA, 80 bp, synthetic construct; identical to SEQ ID NO: 12990
  source 1..80: mol_type = other DNA

SEQ ID NO: 70513 - DNA, 80 bp, synthetic construct; identical to SEQ ID NO: 36434
  source 1..80: mol_type = other DNA

SEQ ID NO: 70514 - DNA, 80 bp, synthetic construct; identical to SEQ ID NO: 36435
  source 1..80: mol_type = other DNA

SEQ ID NO: 70515 - DNA, 80 bp, synthetic construct; identical to SEQ ID NO: 36436
  source 1..80: mol_type = other DNA

SEQ ID NO: 70516 - DNA, 80 bp, synthetic construct; identical to SEQ ID NO: 12991
  source 1..80: mol_type = other DNA

SEQ ID NO: 70517 - DNA, 80 bp, synthetic construct; identical to SEQ ID NO: 36438
  source 1..80: mol_type = other DNA

SEQ ID NO: 70518 - DNA, 80 bp, synthetic construct; identical to SEQ ID NO: 36439
  source 1..80: mol_type = other DNA

SEQ ID NO: 70519 - DNA, 80 bp, synthetic construct; identical to SEQ ID NO: 12992
  source 1..80: mol_type = other DNA

SEQ ID NO: 70520 - DNA, 80 bp, synthetic construct; identical to SEQ ID NO: 36441
  source 1..80: mol_type = other DNA

SEQ ID NO: 70521 - DNA, 80 bp, synthetic construct; identical to SEQ ID NO: 36442
  source 1..80: mol_type = other DNA

SEQ ID NO: 70522 - DNA, 80 bp, synthetic construct; identical to SEQ ID NO: 36443
  source 1..80: mol_type = other DNA

SEQ ID NO: 70523 - DNA, 80 bp, synthetic construct; identical to SEQ ID NO: 36444
  source 1..80: mol_type = other DNA

SEQ ID NO: 70524 - DNA, 80 bp, synthetic construct; identical to SEQ ID NO: 12993
  source 1..80: mol_type = other DNA

SEQ ID NO: 70525 - DNA, 80 bp, synthetic construct; identical to SEQ ID NO: 36446
  source 1..80: mol_type = other DNA

SEQ ID NO: 70526 - DNA, 80 bp, synthetic construct; identical to SEQ ID NO: 36447
  source 1..80: mol_type = other DNA

SEQ ID NO: 70527 - DNA, 80 bp, synthetic construct; identical to SEQ ID NO: 12994
  source 1..80: mol_type = other DNA

SEQ ID NO: 70528 - DNA, 80 bp, synthetic construct; identical to SEQ ID NO: 36449
  source 1..80: mol_type = other DNA

SEQ ID NO: 70529 - DNA, 80 bp, synthetic construct; identical to SEQ ID NO: 36450
  source 1..80: mol_type = other DNA

SEQ ID NO: 70530 - DNA, 80 bp, synthetic construct; identical to SEQ ID NO: 36451
  source 1..80: mol_type = other DNA

SEQ ID NO: 70531 - DNA, 80 bp, synthetic construct; identical to SEQ ID NO: 12995
  source 1..80: mol_type = other DNA

SEQ ID NO: 70532 - DNA, 80 bp, synthetic construct; identical to SEQ ID NO: 36453
  source 1..80: mol_type = other DNA

SEQ ID NO: 70533 - DNA, 80 bp, synthetic construct; identical to SEQ ID NO: 36454
  source 1..80: mol_type = other DNA

SEQ ID NO: 70534 - DNA, 80 bp, synthetic construct; identical to SEQ ID NO: 36455
  source 1..80: mol_type = other DNA

SEQ ID NO: 70535 - DNA, 80 bp, synthetic construct; identical to SEQ ID NO: 12996
  source 1..80: mol_type = other DNA

SEQ ID NO: 70536 - DNA, 80 bp, synthetic construct; identical to SEQ ID NO: 36458
  source 1..80: mol_type = other DNA

SEQ ID NO: 70537 - DNA, 80 bp, synthetic construct; identical to SEQ ID NO: 36459
  source 1..80: mol_type = other DNA

SEQ ID NO: 70538 - DNA, 80 bp, synthetic construct; identical to SEQ ID NO: 12997
  source 1..80: mol_type = other DNA

SEQ ID NO: 70539 - DNA, 80 bp, synthetic construct; identical to SEQ ID NO: 36461
  source 1..80: mol_type = other DNA

SEQ ID NO: 70540 - DNA, 80 bp, synthetic construct; identical to SEQ ID NO: 36462
  source 1..80: mol_type = other DNA

SEQ ID NO: 70541 - DNA, 80 bp, synthetic construct; identical to SEQ ID NO: 36463
  source 1..80: mol_type = other DNA

SEQ ID NO: 70542 - DNA, 80 bp, synthetic construct; identical to SEQ ID NO: 36464
  source 1..80: mol_type = other DNA

SEQ ID NO: 70543 - DNA, 80 bp, synthetic construct; identical to SEQ ID NO: 36465
  source 1..80: mol_type = other DNA

SEQ ID NO: 70544 - DNA, 80 bp, synthetic construct; identical to SEQ ID NO: 36466
  source 1..80: mol_type = other DNA

SEQ ID NO: 70545 - DNA, 80 bp, synthetic construct; identical to SEQ ID NO: 36467
  source 1..80: mol_type = other DNA

SEQ ID NO: 70546 - DNA, 80 bp, synthetic construct; identical to SEQ ID NO: 36468
  source 1..80: mol_type = other DNA

SEQ ID NO: 70547 - DNA, 80 bp, synthetic construct; identical to SEQ ID NO: 12998
  source 1..80: mol_type = other DNA

SEQ ID NO: 70548 - DNA, 80 bp, synthetic construct; identical to SEQ ID NO: 36470
  source 1..80: mol_type = other DNA

SEQ ID NO: 70549 - DNA, 80 bp, synthetic construct; identical to SEQ ID NO: 36472
  source 1..80: mol_type = other DNA

SEQ ID NO: 70550 - DNA, 80 bp, synthetic construct; identical to SEQ ID NO: 12999
  source 1..80: mol_type = other DNA

SEQ ID NO: 70551 - DNA, 80 bp, synthetic construct; identical to SEQ ID NO: 36474
  source 1..80: mol_type = other DNA

SEQ ID NO: 70552 - DNA, 80 bp, synthetic construct; identical to SEQ ID NO: 36475
  source 1..80: mol_type = other DNA

SEQ ID NO: 70553 - DNA, 80 bp, synthetic construct; identical to SEQ ID NO: 36476
  source 1..80: mol_type = other DNA

SEQ ID NO: 70554 - DNA, 80 bp, synthetic construct; identical to SEQ ID NO: 36477
  source 1..80: mol_type = other DNA

SEQ ID NO: 70555 - DNA, 80 bp, synthetic construct; identical to SEQ ID NO: 13000
  source 1..80: mol_type = other DNA

SEQ ID NO: 70556 - DNA, 80 bp, synthetic construct; identical to SEQ ID NO: 36479
  source 1..80: mol_type = other DNA

SEQ ID NO: 70557 - DNA, 80 bp, synthetic construct; identical to SEQ ID NO: 36480
  source 1..80: mol_type = other DNA

SEQ ID NO: 70558 - DNA, 80 bp, synthetic construct; identical to SEQ ID NO: 36481
  source 1..80: mol_type = other DNA

SEQ ID NO: 70559 - DNA, 80 bp, synthetic construct; identical to SEQ ID NO: 13001
  source 1..80: mol_type = other DNA

SEQ ID NO: 70560 - DNA, 80 bp, synthetic construct; identical to SEQ ID NO: 36483
  source 1..80: mol_type = other DNA

SEQ ID NO: 70561 - DNA, 80 bp, synthetic construct; identical to SEQ ID NO: 36484
  source 1..80: mol_type = other DNA

SEQ ID NO: 70562 - DNA, 80 bp, synthetic construct; identical to SEQ ID NO: 36485
  source 1..80: mol_type = other DNA

SEQ ID NO: 70563 - DNA, 80 bp, synthetic construct; identical to SEQ ID NO: 13002
  source 1..80: mol_type = other DNA

SEQ ID NO: 70564 - DNA, 80 bp, synthetic construct; identical to SEQ ID NO: 36487
  source 1..80: mol_type = other DNA

SEQ ID NO: 70565 - DNA, 80 bp, synthetic construct; identical to SEQ ID NO: 36488
  source 1..80: mol_type = other DNA

SEQ ID NO: 70566 - DNA, 80 bp, synthetic construct; identical to SEQ ID NO: 13003
  source 1..80: mol_type = other DNA

SEQ ID NO: 70567 - DNA, 80 bp, synthetic construct; identical to SEQ ID NO: 36490
  source 1..80: mol_type = other DNA

SEQ ID NO: 70568 - DNA, 80 bp, synthetic construct; identical to SEQ ID NO: 36491
  source 1..80: mol_type = other DNA

SEQ ID NO: 70569 - DNA, 80 bp, synthetic construct; identical to SEQ ID NO: 36492
  source 1..80: mol_type = other DNA

SEQ ID NO: 70570 - DNA, 80 bp, synthetic construct; identical to SEQ ID NO: 36493
  source 1..80: mol_type = other DNA

SEQ ID NO: 70571 - DNA, 80 bp, synthetic construct; identical to SEQ ID NO: 13004
  source 1..80: mol_type = other DNA

SEQ ID NO: 70572 - DNA, 80 bp, synthetic construct; identical to SEQ ID NO: 36495
  source 1..80: mol_type = other DNA

SEQ ID NO: 70573 - DNA, 80 bp, synthetic construct; identical to SEQ ID NO: 36496
  source 1..80: mol_type = other DNA

SEQ ID NO: 70574 - DNA, 80 bp, synthetic construct; identical to SEQ ID NO: 13005
  source 1..80: mol_type = other DNA

SEQ ID NO: 70575 - DNA, 80 bp, synthetic construct; identical to SEQ ID NO: 36498
  source 1..80: mol_type = other DNA

SEQ ID NO: 70576 - DNA, 80 bp, synthetic construct; identical to SEQ ID NO: 36499
  source 1..80: mol_type = other DNA

SEQ ID NO: 70577 - DNA, 80 bp, synthetic construct; identical to SEQ ID NO: 36500
  source 1..80: mol_type = other DNA

SEQ ID NO: 70578 - DNA, 80 bp, synthetic construct; identical to SEQ ID NO: 13006
  source 1..80: mol_type = other DNA

SEQ ID NO: 70579 - DNA, 80 bp, synthetic construct; identical to SEQ ID NO: 36502
  source 1..80: mol_type = other DNA

SEQ ID NO: 70580 - DNA, 80 bp, synthetic construct; identical to SEQ ID NO: 36503
  source 1..80: mol_type = other DNA

SEQ ID NO: 70581 - DNA, 80 bp, synthetic construct; identical to SEQ ID NO: 36504
  source 1..80: mol_type = other DNA

SEQ ID NO: 70582 - DNA, 80 bp, synthetic construct; identical to SEQ ID NO: 36505
  source 1..80: mol_type = other DNA

SEQ ID NO: 70583 - DNA, 80 bp, synthetic construct; identical to SEQ ID NO: 13007
  source 1..80: mol_type = other DNA

SEQ ID NO: 70584 - DNA, 80 bp, synthetic construct; identical to SEQ ID NO: 36507
  source 1..80: mol_type = other DNA

SEQ ID NO: 70585 - DNA, 80 bp, synthetic construct; identical to SEQ ID NO: 36508
  source 1..80: mol_type = other DNA

SEQ ID NO: 70586 - DNA, 80 bp, synthetic construct; identical to SEQ ID NO: 36509
  source 1..80: mol_type = other DNA

SEQ ID NO: 70587 - DNA, 80 bp, synthetic construct; identical to SEQ ID NO: 13008
  source 1..80: mol_type = other DNA

SEQ ID NO: 70588 - DNA, 80 bp, synthetic construct; identical to SEQ ID NO: 36512
  source 1..80: mol_type = other DNA

SEQ ID NO: 70589 - DNA, 80 bp, synthetic construct; identical to SEQ ID NO: 36513
  source 1..80: mol_type = other DNA

SEQ ID NO: 70590 - DNA, 80 bp, synthetic construct; identical to SEQ ID NO: 13009
  source 1..80: mol_type = other DNA

SEQ ID NO: 70591 - DNA, 80 bp, synthetic construct; identical to SEQ ID NO: 36516
  source 1..80: mol_type = other DNA

SEQ ID NO: 70592 - DNA, 80 bp, synthetic construct; identical to SEQ ID NO: 36517
  source 1..80: mol_type = other DNA

SEQ ID NO: 70593 - DNA, 80 bp, synthetic construct; identical to SEQ ID NO: 13010
  source 1..80: mol_type = other DNA

SEQ ID NO: 70594 - DNA, 80 bp, synthetic construct; identical to SEQ ID NO: 36519
  source 1..80: mol_type = other DNA

SEQ ID NO: 70595 - DNA, 80 bp, synthetic construct; identical to SEQ ID NO: 36520
  source 1..80: mol_type = other DNA

SEQ ID NO: 70596 - DNA, 80 bp, synthetic construct; identical to SEQ ID NO: 36521
  source 1..80: mol_type = other DNA

SEQ ID NO: 70597 - DNA, 80 bp, synthetic construct; identical to SEQ ID NO: 36522
  source 1..80: mol_type = other DNA

SEQ ID NO: 70598 - DNA, 80 bp, synthetic construct; identical to SEQ ID NO: 13011
  source 1..80: mol_type = other DNA

SEQ ID NO: 70599 - DNA, 80 bp, synthetic construct; identical to SEQ ID NO: 36524
  source 1..80: mol_type = other DNA

SEQ ID NO: 70600 - DNA, 80 bp, synthetic construct; identical to SEQ ID NO: 36525
  source 1..80: mol_type = other DNA

SEQ ID NO: 70601 - DNA, 80 bp, synthetic construct; identical to SEQ ID NO: 36526
  source 1..80: mol_type = other DNA

SEQ ID NO: 70602 - DNA, 80 bp, synthetic construct; identical to SEQ ID NO: 13012
  source 1..80: mol_type = other DNA

SEQ ID NO: 70603 - DNA, 80 bp, synthetic construct; identical to SEQ ID NO: 36528
  source 1..80: mol_type = other DNA

SEQ ID NO: 70604 - DNA, 80 bp, synthetic construct; identical to SEQ ID NO: 36529
  source 1..80: mol_type = other DNA

SEQ ID NO: 70605 - DNA, 80 bp, synthetic construct; identical to SEQ ID NO: 36530
  source 1..80: mol_type = other DNA

SEQ ID NO: 70606 - DNA, 80 bp, synthetic construct; identical to SEQ ID NO: 13013
  source 1..80: mol_type = other DNA

SEQ ID NO: 70607 - DNA, 80 bp, synthetic construct; identical to SEQ ID NO: 36532
  source 1..80: mol_type = other DNA

SEQ ID NO: 70608 - DNA, 80 bp, synthetic construct; identical to SEQ ID NO: 13014
  source 1..80: mol_type = other DNA

SEQ ID NO: 70609 - DNA, 80 bp, synthetic construct; identical to SEQ ID NO: 36534
  source 1..80: mol_type = other DNA

SEQ ID NO: 70610 - DNA, 80 bp, synthetic construct; identical to SEQ ID NO: 36535
  source 1..80: mol_type = other DNA

SEQ ID NO: 70611 - DNA, 80 bp, synthetic construct; identical to SEQ ID NO: 36536
  source 1..80: mol_type = other DNA

SEQ ID NO: 70612 - DNA, 80 bp, synthetic construct; identical to SEQ ID NO: 36537
  source 1..80: mol_type = other DNA

SEQ ID NO: 70613 - DNA, 80 bp, synthetic construct; identical to SEQ ID NO: 13015
  source 1..80: mol_type = other DNA

SEQ ID NO: 70614 - DNA, 80 bp, synthetic construct; identical to SEQ ID NO: 36539
  source 1..80: mol_type = other DNA

SEQ ID NO: 70615 - DNA, 80 bp, synthetic construct; identical to SEQ ID NO: 36540
  source 1..80: mol_type = other DNA

SEQ ID NO: 70616 - DNA, 80 bp, synthetic construct; identical to SEQ ID NO: 36541
  source 1..80: mol_type = other DNA

SEQ ID NO: 70617 - DNA, 80 bp, synthetic construct; identical to SEQ ID NO: 36542
  source 1..80: mol_type = other DNA

SEQ ID NO: 70618 - DNA, 80 bp, synthetic construct; identical to SEQ ID NO: 13016
  source 1..80: mol_type = other DNA

SEQ ID NO: 70619 - DNA, 80 bp, synthetic construct; identical to SEQ ID NO: 36544
  source 1..80: mol_type = other DNA

SEQ ID NO: 70620 - DNA, 80 bp, synthetic construct; identical to SEQ ID NO: 36545
  source 1..80: mol_type = other DNA

SEQ ID NO: 70621 - DNA, 80 bp, synthetic construct; identical to SEQ ID NO: 13017
  source 1..80: mol_type = other DNA

SEQ ID NO: 70622 - DNA, 80 bp, synthetic construct; identical to SEQ ID NO: 36547
  source 1..80: mol_type = other DNA

SEQ ID NO: 70623 - DNA, 80 bp, synthetic construct; identical to SEQ ID NO: 36548
  source 1..80: mol_type = other DNA

SEQ ID NO: 70624 - DNA, 80 bp, synthetic construct; identical to SEQ ID NO: 36549
  source 1..80: mol_type = other DNA

SEQ ID NO: 70625 - DNA, 80 bp, synthetic construct; identical to SEQ ID NO: 13018
  source 1..80: mol_type = other DNA

SEQ ID NO: 70626 - DNA, 80 bp, synthetic construct; identical to SEQ ID NO: 36551
  source 1..80: mol_type = other DNA

SEQ ID NO: 70627 - DNA, 80 bp, synthetic construct; identical to SEQ ID NO: 36552
  source 1..80: mol_type = other DNA

SEQ ID NO: 70628 - DNA, 80 bp, synthetic construct; identical to SEQ ID NO: 36553
  source 1..80: mol_type = other DNA

SEQ ID NO: 70629 - DNA, 80 bp, synthetic construct; identical to SEQ ID NO: 13019
  source 1..80: mol_type = other DNA

SEQ ID NO: 70630 - DNA, 80 bp, synthetic construct; identical to SEQ ID NO: 36555
  source 1..80: mol_type = other DNA

SEQ ID NO: 70631 - DNA, 80 bp, synthetic construct; identical to SEQ ID NO: 36556
  source 1..80: mol_type = other DNA

SEQ ID NO: 70632 - DNA, 80 bp, synthetic construct; identical to SEQ ID NO: 36557
  source 1..80: mol_type = other DNA

SEQ ID NO: 70633 - DNA, 80 bp, synthetic construct; identical to SEQ ID NO: 36558
  source 1..80: mol_type = other DNA

SEQ ID NO: 70634 - DNA, 80 bp, synthetic construct; identical to SEQ ID NO: 13020
  source 1..80: mol_type = other DNA

SEQ ID NO: 70635 - DNA, 80 bp, synthetic construct; identical to SEQ ID NO: 36560
  source 1..80: mol_type = other DNA

SEQ ID NO: 70636 - DNA, 80 bp, synthetic construct; identical to SEQ ID NO: 36561
  source 1..80: mol_type = other DNA

SEQ ID NO: 70637 - DNA, 80 bp, synthetic construct; identical to SEQ ID NO: 13021
  source 1..80: mol_type = other DNA

SEQ ID NO: 70638 - DNA, 80 bp, synthetic construct; identical to SEQ ID NO: 36563
  source 1..80: mol_type = other DNA

SEQ ID NO: 70639 - DNA, 80 bp, synthetic construct; identical to SEQ ID NO: 36564
  source 1..80: mol_type = other DNA

SEQ ID NO: 70640 - DNA, 80 bp, synthetic construct; identical to SEQ ID NO: 36565
  source 1..80: mol_type = other DNA

SEQ ID NO: 70641 - DNA, 80 bp, synthetic construct; identical to SEQ ID NO: 36566
  source 1..80: mol_type = other DNA

SEQ ID NO: 70642 - DNA, 80 bp, synthetic construct; identical to SEQ ID NO: 13022
  source 1..80: mol_type = other DNA

SEQ ID NO: 70643 - DNA, 80 bp, synthetic construct; identical to SEQ ID NO: 36568
  source 1..80: mol_type = other DNA

SEQ ID NO: 70644 - DNA, 80 bp, synthetic construct; identical to SEQ ID NO: 36569
  source 1..80: mol_type = other DNA

SEQ ID NO: 70645 - DNA, 80 bp, synthetic construct; identical to SEQ ID NO: 13023
  source 1..80: mol_type = other DNA

SEQ ID NO: 70646 - DNA, 80 bp, synthetic construct; identical to SEQ ID NO: 36571
  source 1..80: mol_type = other DNA

SEQ ID NO: 70647 - DNA, 80 bp, synthetic construct; identical to SEQ ID NO: 36572
  source 1..80: mol_type = other DNA

SEQ ID NO: 70648 - DNA, 80 bp, synthetic construct; identical to SEQ ID NO: 36573
  source 1..80: mol_type = other DNA

SEQ ID NO: 70649 - DNA, 80 bp, synthetic construct; identical to SEQ ID NO: 13024
  source 1..80: mol_type = other DNA

SEQ ID NO: 70650 - DNA, 80 bp, synthetic construct; identical to SEQ ID NO: 36575
  source 1..80: mol_type = other DNA

SEQ ID NO: 70651 - DNA, 80 bp, synthetic construct; identical to SEQ ID NO: 36576
  source 1..80: mol_type = other DNA

SEQ ID NO: 70652 - DNA, 80 bp, synthetic construct; identical to SEQ ID NO: 36577
  source 1..80: mol_type = other DNA

SEQ ID NO: 70653 - DNA, 80 bp, synthetic construct; identical to SEQ ID NO: 36578
  source 1..80: mol_type = other DNA

SEQ ID NO: 70654 - DNA, 80 bp, synthetic construct; identical to SEQ ID NO: 13025
  source 1..80: mol_type = other DNA

SEQ ID NO: 70655 - DNA, 80 bp, synthetic construct; identical to SEQ ID NO: 36580
  source 1..80: mol_type = other DNA

SEQ ID NO: 70656 - DNA, 80 bp, synthetic construct; identical to SEQ ID NO: 36581
  source 1..80: mol_type = other DNA

SEQ ID NO: 70657 - DNA, 80 bp, synthetic construct; identical to SEQ ID NO: 36582
  source 1..80: mol_type = other DNA

SEQ ID NO: 70658 - DNA, 80 bp, synthetic construct; identical to SEQ ID NO: 13026
  source 1..80: mol_type = other DNA

SEQ ID NO: 70659 - DNA, 80 bp, synthetic construct; identical to SEQ ID NO: 36584
  source 1..80: mol_type = other DNA

SEQ ID NO: 70660 - DNA, 80 bp, synthetic construct; identical to SEQ ID NO: 36585
  source 1..80: mol_type = other DNA

SEQ ID NO: 70661 - DNA, 80 bp, synthetic construct; identical to SEQ ID NO: 36586
  source 1..80: mol_type = other DNA

SEQ ID NO: 70662 - DNA, 80 bp, synthetic construct; identical to SEQ ID NO: 13027
  source 1..80: mol_type = other DNA

SEQ ID NO: 70663 - DNA, 80 bp, synthetic construct; identical to SEQ ID NO: 36588
  source 1..80: mol_type = other DNA

SEQ ID NO: 70664 - DNA, 80 bp, synthetic construct; identical to SEQ ID NO: 36589
  source 1..80: mol_type = other DNA

SEQ ID NO: 70665 - DNA, 80 bp, synthetic construct; identical to SEQ ID NO: 36590
  source 1..80: mol_type = other DNA

SEQ ID NO: 70666 - DNA, 80 bp, synthetic construct; identical to SEQ ID NO: 13028
  source 1..80: mol_type = other DNA

SEQ ID NO: 70667 - DNA, 80 bp, synthetic construct; identical to SEQ ID NO: 36593
  source 1..80: mol_type = other DNA

SEQ ID NO: 70668 - DNA, 80 bp, synthetic construct; identical to SEQ ID NO: 36594
  source 1..80: mol_type = other DNA

SEQ ID NO: 70669 - DNA, 80 bp, synthetic construct; identical to SEQ ID NO: 13029
  source 1..80: mol_type = other DNA

SEQ ID NO: 70670 - DNA, 80 bp, synthetic construct; identical to SEQ ID NO: 36596
  source 1..80: mol_type = other DNA

SEQ ID NO: 70671 - DNA, 80 bp, synthetic construct; identical to SEQ ID NO: 13030
  source 1..80: mol_type = other DNA

SEQ ID NO: 70672 - DNA, 80 bp, synthetic construct; identical to SEQ ID NO: 36598
  source 1..80: mol_type = other DNA

SEQ ID NO: 70673 - DNA, 80 bp, synthetic construct; identical to SEQ ID NO: 36599
  source 1..80: mol_type = other DNA

SEQ ID NO: 70674 - DNA, 80 bp, synthetic construct; identical to SEQ ID NO: 36600
  source 1..80: mol_type = other DNA

SEQ ID NO: 70675 - DNA, 80 bp, synthetic construct; identical to SEQ ID NO: 36601
  source 1..80: mol_type = other DNA

SEQ ID NO: 70676 - DNA, 80 bp, synthetic construct; identical to SEQ ID NO: 13031
  source 1..80: mol_type = other DNA

SEQ ID NO: 70677 - DNA, 80 bp, synthetic construct; identical to SEQ ID NO: 36603
  source 1..80: mol_type = other DNA

SEQ ID NO: 70678 - DNA, 80 bp, synthetic construct; identical to SEQ ID NO: 36604
  source 1..80: mol_type = other DNA

SEQ ID NO: 70679 - DNA, 80 bp, synthetic construct; identical to SEQ ID NO: 13032
  source 1..80: mol_type = other DNA

SEQ ID NO: 70680 - DNA, 80 bp, synthetic construct; identical to SEQ ID NO: 36606
  source 1..80: mol_type = other DNA

SEQ ID NO: 70681 - DNA, 80 bp, synthetic construct; identical to SEQ ID NO: 36607
  source 1..80: mol_type = other DNA

SEQ ID NO: 70682 - DNA, 80 bp, synthetic construct; identical to SEQ ID NO: 36608
  source 1..80: mol_type = other DNA

SEQ ID NO: 70683 - DNA, 80 bp, synthetic construct; identical to SEQ ID NO: 13033
  source 1..80: mol_type = other DNA

SEQ ID NO: 70684 - DNA, 80 bp, synthetic construct; identical to SEQ ID NO: 36610
  source 1..80: mol_type = other DNA

SEQ ID NO: 70685 - DNA, 80 bp, synthetic construct; identical to SEQ ID NO: 36611
  source 1..80: mol_type = other DNA

SEQ ID NO: 70686 - DNA, 80 bp, synthetic construct; identical to SEQ ID NO: 36612
  source 1..80: mol_type = other DNA

SEQ ID NO: 70687 - DNA, 80 bp, synthetic construct; identical to SEQ ID NO: 36613
  source 1..80: mol_type = other DNA

SEQ ID NO: 70688 - DNA, 80 bp, synthetic construct; identical to SEQ ID NO: 13034
  source 1..80: mol_type = other DNA

SEQ ID NO: 70689 - DNA, 80 bp, synthetic construct; identical to SEQ ID NO: 36616
  source 1..80: mol_type = other DNA

SEQ ID NO: 70690 - DNA, 80 bp, synthetic construct; identical to SEQ ID NO: 13035
  source 1..80: mol_type = other DNA

SEQ ID NO: 70691 - DNA, 80 bp, synthetic construct; identical to SEQ ID NO: 36619
  source 1..80: mol_type = other DNA

SEQ ID NO: 70692 - DNA, 80 bp, synthetic construct; identical to SEQ ID NO: 36620
  source 1..80: mol_type = other DNA

SEQ ID NO: 70693 - DNA, 80 bp, synthetic construct; identical to SEQ ID NO: 36621
  source 1..80: mol_type = other DNA

SEQ ID NO: 70694 - DNA, 80 bp, synthetic construct; identical to SEQ ID NO: 13036
  source 1..80: mol_type = other DNA

SEQ ID NO: 70695 - DNA, 80 bp, synthetic construct; identical to SEQ ID NO: 36623
  source 1..80: mol_type = other DNA

SEQ ID NO: 70696 - DNA, 80 bp, synthetic construct; identical to SEQ ID NO: 36624
  source 1..80: mol_type = other DNA

SEQ ID NO: 70697 - DNA, 80 bp, synthetic construct; identical to SEQ ID NO: 13037
  source 1..80: mol_type = other DNA

SEQ ID NO: 70698 - DNA, 80 bp, synthetic construct; identical to SEQ ID NO: 36626
  source 1..80: mol_type = other DNA

SEQ ID NO: 70699 - DNA, 80 bp, synthetic construct; identical to SEQ ID NO: 36627
  source 1..80: mol_type = other DNA

SEQ ID NO: 70700 - DNA, 80 bp, synthetic construct; identical to SEQ ID NO: 36628
  source 1..80: mol_type = other DNA

SEQ ID NO: 70701 - DNA, 80 bp, synthetic construct; identical to SEQ ID NO: 36629
  source 1..80: mol_type = other DNA

SEQ ID NO: 70702 - DNA, 80 bp, synthetic construct; identical to SEQ ID NO: 13038
  source 1..80: mol_type = other DNA

SEQ ID NO: 70703 - DNA, 80 bp, synthetic construct; identical to SEQ ID NO: 36631
  source 1..80: mol_type = other DNA

SEQ ID NO: 70704 - DNA, 80 bp, synthetic construct; identical to SEQ ID NO: 36632
  source 1..80: mol_type = other DNA

SEQ ID NO: 70705 - DNA, 80 bp, synthetic construct; identical to SEQ ID NO: 13039
  source 1..80: mol_type = other DNA

SEQ ID NO: 70706 - DNA, 80 bp, synthetic construct; identical to SEQ ID NO: 36634
  source 1..80: mol_type = other DNA

SEQ ID NO: 70707 - DNA, 80 bp, synthetic construct; identical to SEQ ID NO: 36635
  source 1..80: mol_type = other DNA

SEQ ID NO: 70708 - DNA, 80 bp, synthetic construct; identical to SEQ ID NO: 36636
  source 1..80: mol_type = other DNA

SEQ ID NO: 70709 - DNA, 80 bp, synthetic construct; identical to SEQ ID NO: 13040
  source 1..80: mol_type = other DNA

SEQ ID NO: 70710 - DNA, 80 bp, synthetic construct; identical to SEQ ID NO: 36638
  source 1..80: mol_type = other DNA

SEQ ID NO: 70711 - DNA, 80 bp, synthetic construct; identical to SEQ ID NO: 36639
  source 1..80: mol_type = other DNA

SEQ ID NO: 70712 - DNA, 80 bp, synthetic construct; identical to SEQ ID NO: 36640
  source 1..80: mol_type = other DNA

SEQ ID NO: 70713 - DNA, 80 bp, synthetic construct; identical to SEQ ID NO: 13041
  source 1..80: mol_type = other DNA

SEQ ID NO: 70714 - DNA, 80 bp, synthetic construct; identical to SEQ ID NO: 36642
  source 1..80: mol_type = other DNA

SEQ ID NO: 70715 - DNA, 80 bp, synthetic construct; identical to SEQ ID NO: 36643
  source 1..80: mol_type = other DNA

SEQ ID NO: 70716 - DNA, 80 bp, synthetic construct; identical to SEQ ID NO: 36644
  source 1..80: mol_type = other DNA

SEQ ID NO: 70717 - DNA, 80 bp, synthetic construct; identical to SEQ ID NO: 36645
  source 1..80: mol_type = other DNA

SEQ ID NO: 70718 - DNA, 80 bp, synthetic construct; identical to SEQ ID NO: 13042
  source 1..80: mol_type = other DNA

SEQ ID NO: 70719 - DNA, 80 bp, synthetic construct; identical to SEQ ID NO: 36647
  source 1..80: mol_type = other DNA

SEQ ID NO: 70720 - DNA, 80 bp, synthetic construct; identical to SEQ ID NO: 36648
  source 1..80: mol_type = other DNA

SEQ ID NO: 70721 - DNA, 80 bp, synthetic construct; identical to SEQ ID NO: 36649
  source 1..80: mol_type = other DNA

SEQ ID NO: 70722 - DNA, 80 bp, synthetic construct; identical to SEQ ID NO: 13043
  source 1..80: mol_type = other DNA

SEQ ID NO: 70723 - DNA, 80 bp, synthetic construct; identical to SEQ ID NO: 36651
  source 1..80: mol_type = other DNA

SEQ ID NO: 70724 - DNA, 80 bp, synthetic construct; identical to SEQ ID NO: 36652
  source 1..80: mol_type = other DNA

SEQ ID NO: 70725 - DNA, 80 bp, synthetic construct; identical to SEQ ID NO: 13044
  source 1..80: mol_type = other DNA

SEQ ID NO: 70726 - DNA, 80 bp, synthetic construct; identical to SEQ ID NO: 36654
  source 1..80: mol_type = other DNA

SEQ ID NO: 70727 - DNA, 80 bp, synthetic construct; identical to SEQ ID NO: 36655
  source 1..80: mol_type = other DNA

SEQ ID NO: 70728 - DNA, 80 bp, synthetic construct; identical to SEQ ID NO: 36656
  source 1..80: mol_type = other DNA

SEQ ID NO: 70729 - DNA, 80 bp, synthetic construct; identical to SEQ ID NO: 36657
  source 1..80: mol_type = other DNA

SEQ ID NO: 70730 - DNA, 80 bp, synthetic construct; identical to SEQ ID NO: 13045
  source 1..80: mol_type = other DNA

SEQ ID NO: 70731 - DNA, 80 bp, synthetic construct; identical to SEQ ID NO: 36659
  source 1..80: mol_type = other DNA

SEQ ID NO: 70732 - DNA, 80 bp, synthetic construct; identical to SEQ ID NO: 36660
  source 1..80: mol_type = other DNA

SEQ ID NO: 70733 - DNA, 80 bp, synthetic construct; identical to SEQ ID NO: 13046
  source 1..80: mol_type = other DNA

SEQ ID NO: 70734 - DNA, 80 bp, synthetic construct; identical to SEQ ID NO: 36663
  source 1..80: mol_type = other DNA

SEQ ID NO: 70735 - DNA, 80 bp, synthetic construct; identical to SEQ ID NO: 36664
  source 1..80: mol_type = other DNA

SEQ ID NO: 70736 - DNA, 80 bp, synthetic construct; identical to SEQ ID NO: 13047
  source 1..80: mol_type = other DNA

SEQ ID NO: 70737 - DNA, 80 bp, synthetic construct; identical to SEQ ID NO: 36666
  source 1..80: mol_type = other DNA

SEQ ID NO: 70738 - DNA, 80 bp, synthetic construct; identical to SEQ ID NO: 36667
  source 1..80: mol_type = other DNA

SEQ ID NO: 70739 - DNA, 80 bp, synthetic construct; identical to SEQ ID NO: 36668
  source 1..80: mol_type = other DNA

SEQ ID NO: 70740 - DNA, 80 bp, synthetic construct; identical to SEQ ID NO: 13048
  source 1..80: mol_type = other DNA

SEQ ID NO: 70741 - DNA, 80 bp, synthetic construct; identical to SEQ ID NO: 36670
  source 1..80: mol_type = other DNA

SEQ ID NO: 70742 - DNA, 80 bp, synthetic construct; identical to SEQ ID NO: 36671
  source 1..80: mol_type = other DNA

SEQ ID NO: 70743 - DNA, 80 bp, synthetic construct; identical to SEQ ID NO: 36673
  source 1..80: mol_type = other DNA

SEQ ID NO: 70744 - DNA, 80 bp, synthetic construct; identical to SEQ ID NO: 13049
  source 1..80: mol_type = other DNA

SEQ ID NO: 70745 - DNA, 80 bp, synthetic construct; identical to SEQ ID NO: 36675
  source 1..80: mol_type = other DNA

SEQ ID NO: 70746 - DNA, 80 bp, synthetic construct; identical to SEQ ID NO: 36676
  source 1..80: mol_type = other DNA

SEQ ID NO: 70747 - DNA, 80 bp, synthetic construct; identical to SEQ ID NO: 36677
  source 1..80: mol_type = other DNA

SEQ ID NO: 70748 - DNA, 80 bp, synthetic construct; identical to SEQ ID NO: 13050
  source 1..80: mol_type = other DNA

SEQ ID NO: 70749 - DNA, 80 bp, synthetic construct; identical to SEQ ID NO: 36679
  source 1..80: mol_type = other DNA

SEQ ID NO: 70750 - DNA, 80 bp, synthetic construct; identical to SEQ ID NO: 36680
  source 1..80: mol_type = other DNA

SEQ ID NO: 70751 - DNA, 80 bp, synthetic construct; identical to SEQ ID NO: 13051
  source 1..80: mol_type = other DNA

SEQ ID NO: 70752 - DNA, 80 bp, synthetic construct; identical to SEQ ID NO: 36683
  source 1..80: mol_type = other DNA

SEQ ID NO: 70753 - DNA, 80 bp, synthetic construct; identical to SEQ ID NO: 36684
  source 1..80: mol_type = other DNA

SEQ ID NO: 70754 - DNA, 80 bp, synthetic construct; identical to SEQ ID NO: 36685
  source 1..80: mol_type = other DNA

SEQ ID NO: 70755 - DNA, 80 bp, synthetic construct; identical to SEQ ID NO: 13052
  source 1..80: mol_type = other DNA

SEQ ID NO: 70756 - DNA, 80 bp, synthetic construct; identical to SEQ ID NO: 36687
  source 1..80: mol_type = other DNA

SEQ ID NO: 70757 - DNA, 80 bp, synthetic construct; identical to SEQ ID NO: 36688
  source 1..80: mol_type = other DNA

SEQ ID NO: 70758 - DNA, 80 bp, synthetic construct; identical to SEQ ID NO: 13053
  source 1..80: mol_type = other DNA

SEQ ID NO: 70759 - DNA, 80 bp, synthetic construct; identical to SEQ ID NO: 36690
  source 1..80: mol_type = other DNA

SEQ ID NO: 70760 - DNA, 80 bp, synthetic construct; identical to SEQ ID NO: 36691
  source 1..80: mol_type = other DNA

SEQ ID NO: 70761 - DNA, 80 bp, synthetic construct; identical to SEQ ID NO: 36692
  source 1..80: mol_type = other DNA

SEQ ID NO: 70762 - DNA, 80 bp, synthetic construct; identical to SEQ ID NO: 13054
  source 1..80: mol_type = other DNA

SEQ ID NO: 70763 - DNA, 80 bp, synthetic construct; identical to SEQ ID NO: 36694
  source 1..80: mol_type = other DNA

SEQ ID NO: 70764 - DNA, 80 bp, synthetic construct; identical to SEQ ID NO: 36695
  source 1..80: mol_type = other DNA

SEQ ID NO: 70765 - DNA, 80 bp, synthetic construct; identical to SEQ ID NO: 36696
  source 1..80: mol_type = other DNA

SEQ ID NO: 70766 - DNA, 80 bp, synthetic construct; identical to SEQ ID NO: 13055
  source 1..80: mol_type = other DNA

SEQ ID NO: 70767 - DNA, 80 bp, synthetic construct; identical to SEQ ID NO: 36698
  source 1..80: mol_type = other DNA

SEQ ID NO: 70768 - DNA, 80 bp, synthetic construct; identical to SEQ ID NO: 36699
  source 1..80: mol_type = other DNA

SEQ ID NO: 70769 - DNA, 80 bp, synthetic construct; identical to SEQ ID NO: 36700
  source 1..80: mol_type = other DNA

SEQ ID NO: 70770 - DNA, 80 bp, synthetic construct; identical to SEQ ID NO: 13056
  source 1..80: mol_type = other DNA

SEQ ID NO: 70771 - DNA, 80 bp, synthetic construct; identical to SEQ ID NO: 36702
  source 1..80: mol_type = other DNA

SEQ ID NO: 70772 - DNA, 80 bp, synthetic construct; identical to SEQ ID NO: 36703
  source 1..80: mol_type = other DNA

SEQ ID NO: 70773 - DNA, 80 bp, synthetic construct; identical to SEQ ID NO: 36704
  source 1..80: mol_type = other DNA

SEQ ID NO: 70774 - DNA, 80 bp, synthetic construct; identical to SEQ ID NO: 36705
  source 1..80: mol_type = other DNA

SEQ ID NO: 70775 - DNA, 80 bp, synthetic construct; identical to SEQ ID NO: 13057
  source 1..80: mol_type = other DNA

SEQ ID NO: 70776 - DNA, 80 bp, synthetic construct; identical to SEQ ID NO: 36707
  source 1..80: mol_type = other DNA

SEQ ID NO: 70777 - DNA, 80 bp, synthetic construct; identical to SEQ ID NO: 36708
  source 1..80: mol_type = other DNA

SEQ ID NO: 70778 - DNA, 80 bp, synthetic construct; identical to SEQ ID NO: 13058
  source 1..80: mol_type = other DNA

SEQ ID NO: 70779 - DNA, 80 bp, synthetic construct; identical to SEQ ID NO: 36710
  source 1..80: mol_type = other DNA

SEQ ID NO: 70780 - DNA, 80 bp, synthetic construct; identical to SEQ ID NO: 36711
  source 1..80: mol_type = other DNA

SEQ ID NO: 70781 - DNA, 80 bp, synthetic construct; identical to SEQ ID NO: 36712
  source 1..80: mol_type = other DNA

SEQ ID NO: 70782 - DNA, 80 bp, synthetic construct; identical to SEQ ID NO: 13059
  source 1..80: mol_type = other DNA

SEQ ID NO: 70783 - DNA, 80 bp, synthetic construct; identical to SEQ ID NO: 36715
  source 1..80: mol_type = other DNA

SEQ ID NO: 70784 - DNA, 80 bp, synthetic construct; identical to SEQ ID NO: 36716
  source 1..80: mol_type = other DNA

SEQ ID NO: 70785 - DNA, 80 bp, synthetic construct; identical to SEQ ID NO: 13060
  source 1..80: mol_type = other DNA

SEQ ID NO: 70786 - DNA, 80 bp, synthetic construct; identical to SEQ ID NO: 36718
  source 1..80: mol_type = other DNA

SEQ ID NO: 70787 - DNA, 80 bp, synthetic construct; identical to SEQ ID NO: 36719
  source 1..80: mol_type = other DNA

SEQ ID NO: 70788 - DNA, 80 bp, synthetic construct; identical to SEQ ID NO: 36720
  source 1..80: mol_type = other DNA

SEQ ID NO: 70789 - DNA, 80 bp, synthetic construct; identical to SEQ ID NO: 36721
  source 1..80: mol_type = other DNA

SEQ ID NO: 70790 - DNA, 80 bp, synthetic construct; identical to SEQ ID NO: 13061
  source 1..80: mol_type = other DNA

SEQ ID NO: 70791 - DNA, 80 bp, synthetic construct; identical to SEQ ID NO: 36723
  source 1..80: mol_type = other DNA

SEQ ID NO: 70792 - DNA, 80 bp, synthetic construct; identical to SEQ ID NO: 36724
  source 1..80: mol_type = other DNA

SEQ ID NO: 70793 - DNA, 80 bp, synthetic construct; identical to SEQ ID NO: 13062
  source 1..80: mol_type = other DNA

SEQ ID NO: 70794 - DNA, 80 bp, synthetic construct; identical to SEQ ID NO: 36726
  source 1..80: mol_type = other DNA

SEQ ID NO: 70795 - DNA, 80 bp, synthetic construct; identical to SEQ ID NO: 36727
  source 1..80: mol_type = other DNA

SEQ ID NO: 70796 - DNA, 80 bp, synthetic construct; identical to SEQ ID NO: 36728
  source 1..80: mol_type = other DNA

SEQ ID NO: 70797 - DNA, 80 bp, synthetic construct; identical to SEQ ID NO: 13063
  source 1..80: mol_type = other DNA

SEQ ID NO: 70798 - DNA, 80 bp, synthetic construct; identical to SEQ ID NO: 36731
  source 1..80: mol_type = other DNA

SEQ ID NO: 70799 - DNA, 80 bp, synthetic construct; identical to SEQ ID NO: 36732
  source 1..80: mol_type = other DNA

SEQ ID NO: 70800 - DNA, 80 bp, synthetic construct; identical to SEQ ID NO: 13064
  source 1..80: mol_type = other DNA

SEQ ID NO: 70801 - DNA, 80 bp, synthetic construct; identical to SEQ ID NO: 36734
  source 1..80: mol_type = other DNA

SEQ ID NO: 70802 - DNA, 80 bp, synthetic construct; identical to SEQ ID NO: 36735
  source 1..80: mol_type = other DNA

SEQ ID NO: 70803 - DNA, 80 bp, synthetic construct; identical to SEQ ID NO: 36736
  source 1..80: mol_type = other DNA

SEQ ID NO: 70804 - DNA, 80 bp, synthetic construct; identical to SEQ ID NO: 13065
  source 1..80: mol_type = other DNA

SEQ ID NO: 70805 - DNA, 80 bp, synthetic construct; identical to SEQ ID NO: 36738
  source 1..80: mol_type = other DNA

SEQ ID NO: 70806 - DNA, 80 bp, synthetic construct; identical to SEQ ID NO: 36739
  source 1..80: mol_type = other DNA

SEQ ID NO: 70807 - DNA, 80 bp, synthetic construct; identical to SEQ ID NO: 36740
  source 1..80: mol_type = other DNA

SEQ ID NO: 70808 - DNA, 80 bp, synthetic construct; identical to SEQ ID NO: 13066
  source 1..80: mol_type = other DNA

SEQ ID NO: 70809 - DNA, 80 bp, synthetic construct; identical to SEQ ID NO: 36742
  source 1..80: mol_type = other DNA

SEQ ID NO: 70810 - DNA, 80 bp, synthetic construct; identical to SEQ ID NO: 36743
  source 1..80: mol_type = other DNA

SEQ ID NO: 70811 - DNA, 80 bp, synthetic construct; identical to SEQ ID NO: 36744
  source 1..80: mol_type = other DNA

SEQ ID NO: 70812 - DNA, 80 bp, synthetic construct; identical to SEQ ID NO: 36745
  source 1..80: mol_type = other DNA

SEQ ID NO: 70813 - DNA, 80 bp, synthetic construct; identical to SEQ ID NO: 13067
  source 1..80: mol_type = other DNA

SEQ ID NO: 70814 - DNA, 80 bp, synthetic construct; identical to SEQ ID NO: 36747
  source 1..80: mol_type = other DNA

SEQ ID NO: 70815 - DNA, 80 bp, synthetic construct; identical to SEQ ID NO: 36748
  source 1..80: mol_type = other DNA

SEQ ID NO: 70816 - DNA, 80 bp, synthetic construct; identical to SEQ ID NO: 13068
  source 1..80: mol_type = other DNA

SEQ ID NO: 70817 - DNA, 80 bp, synthetic construct; identical to SEQ ID NO: 36750
  source 1..80: mol_type = other DNA

SEQ ID NO: 70818 - DNA, 80 bp, synthetic construct; identical to SEQ ID NO: 36751
  source 1..80: mol_type = other DNA

SEQ ID NO: 70819 - DNA, 80 bp, synthetic construct; identical to SEQ ID NO: 36752
  source 1..80: mol_type = other DNA

SEQ ID NO: 70820 - DNA, 80 bp, synthetic construct; identical to SEQ ID NO: 13069
  source 1..80: mol_type = other DNA

SEQ ID NO: 70821 - DNA, 80 bp, synthetic construct; identical to SEQ ID NO: 36754
  source 1..80: mol_type = other DNA

SEQ ID NO: 70822 - DNA, 80 bp, synthetic construct; identical to SEQ ID NO: 36755
  source 1..80: mol_type = other DNA

SEQ ID NO: 70823 - DNA, 80 bp, synthetic construct; identical to SEQ ID NO: 36756
  source 1..80: mol_type = other DNA

SEQ ID NO: 70824 - DNA, 80 bp, synthetic construct; identical to SEQ ID NO: 13070
  source 1..80: mol_type = other DNA

SEQ ID NO: 70825 - DNA, 80 bp, synthetic construct; identical to SEQ ID NO: 36758
  source 1..80: mol_type = other DNA

SEQ ID NO: 70826 - DNA, 80 bp, synthetic construct; identical to SEQ ID NO: 36759
  source 1..80: mol_type = other DNA

SEQ ID NO: 70827 - DNA, 80 bp, synthetic construct; identical to SEQ ID NO: 36760
  source 1..80: mol_type = other DNA

SEQ ID NO: 70828 - DNA, 80 bp, synthetic construct; identical to SEQ ID NO: 13071
  source 1..80: mol_type = other DNA

SEQ ID NO: 70829 - DNA, 80 bp, synthetic construct; identical to SEQ ID NO: 36762
  source 1..80: mol_type = other DNA

SEQ ID NO: 70830 - DNA, 80 bp, synthetic construct; identical to SEQ ID NO: 36763
  source 1..80: mol_type = other DNA

SEQ ID NO: 70831 - DNA, 80 bp, synthetic construct; identical to SEQ ID NO: 36764
  source 1..80: mol_type = other DNA

SEQ ID NO: 70832 - DNA, 80 bp, synthetic construct; identical to SEQ ID NO: 36765
  source 1..80: mol_type = other DNA

SEQ ID NO: 70833 - DNA, 80 bp, synthetic construct; identical to SEQ ID NO: 13072
  source 1..80: mol_type = other DNA

SEQ ID NO: 70834 - DNA, 80 bp, synthetic construct; identical to SEQ ID NO: 36767
  source 1..80: mol_type = other DNA

SEQ ID NO: 70835 - DNA, 80 bp, synthetic construct; identical to SEQ ID NO: 36768
  source 1..80: mol_type = other DNA

SEQ ID NO: 70836 - DNA, 80 bp, synthetic construct; identical to SEQ ID NO: 36769
  source 1..80: mol_type = other DNA

SEQ ID NO: 70837 - DNA, 80 bp, synthetic construct; identical to SEQ ID NO: 13073
  source 1..80: mol_type = other DNA

SEQ ID NO: 70838 - DNA, 80 bp, synthetic construct; identical to SEQ ID NO: 36771
  source 1..80: mol_type = other DNA

SEQ ID NO: 70839 - DNA, 80 bp, synthetic construct; identical to SEQ ID NO: 36772
  source 1..80: mol_type = other DNA

SEQ ID NO: 70840 - DNA, 80 bp, synthetic construct; identical to SEQ ID NO: 13074
  source 1..80: mol_type = other DNA

SEQ ID NO: 70841 - DNA, 80 bp, synthetic construct; identical to SEQ ID NO: 36774
  source 1..80: mol_type = other DNA

SEQ ID NO: 70842 - DNA, 80 bp, synthetic construct; identical to SEQ ID NO: 36775
  source 1..80: mol_type = other DNA

SEQ ID NO: 70843 - DNA, 80 bp, synthetic construct; identical to SEQ ID NO: 36776
  source 1..80: mol_type = other DNA

SEQ ID NO: 70844 - DNA, 80 bp, synthetic construct; identical to SEQ ID NO: 36777
  source 1..80: mol_type = other DNA

SEQ ID NO: 70845 - DNA, 80 bp, synthetic construct; identical to SEQ ID NO: 13075
  source 1..80: mol_type = other DNA

SEQ ID NO: 70846 - DNA, 80 bp, synthetic construct; identical to SEQ ID NO: 36779
  source 1..80: mol_type = other DNA

SEQ ID NO: 70847 - DNA, 80 bp, synthetic construct; identical to SEQ ID NO: 36780
  source 1..80: mol_type = other DNA

SEQ ID NO: 70848 - DNA, 80 bp, synthetic construct; identical to SEQ ID NO: 36781
  source 1..80: mol_type = other DNA

SEQ ID NO: 70849 - DNA, 80 bp, synthetic construct; identical to SEQ ID NO: 13076
  source 1..80: mol_type = other DNA

SEQ ID NO: 70850 - DNA, 80 bp, synthetic construct; identical to SEQ ID NO: 36783
  source 1..80: mol_type = other DNA

SEQ ID NO: 70851 - DNA, 80 bp, synthetic construct; identical to SEQ ID NO: 36784
  source 1..80: mol_type = other DNA

SEQ ID NO: 70852 - DNA, 80 bp, synthetic construct; identical to SEQ ID NO: 13077
  source 1..80: mol_type = other DNA

SEQ ID NO: 70853 - DNA, 80 bp, synthetic construct; identical to SEQ ID NO: 36786
  source 1..80: mol_type = other DNA

SEQ ID NO: 70854 - DNA, 80 bp, synthetic construct; identical to SEQ ID NO: 36787
  source 1..80: mol_type = other DNA

SEQ ID NO: 70855 - DNA, 80 bp, synthetic construct; identical to SEQ ID NO: 36788
  source 1..80: mol_type = other DNA

SEQ ID NO: 70856 - DNA, 80 bp, synthetic construct; identical to SEQ ID NO: 13078
  source 1..80: mol_type = other DNA

SEQ ID NO: 70857 - DNA, 80 bp, synthetic construct; identical to SEQ ID NO: 36791
  source 1..80: mol_type = other DNA

SEQ ID NO: 70858 - DNA, 80 bp, synthetic construct; identical to SEQ ID NO: 36792
  source 1..80: mol_type = other DNA

SEQ ID NO: 70859 - DNA, 80 bp, synthetic construct; identical to SEQ ID NO: 13079
  source 1..80: mol_type = other DNA

SEQ ID NO: 70860 - DNA, 80 bp, synthetic construct; identical to SEQ ID NO: 36794
  source 1..80: mol_type = other DNA

SEQ ID NO: 70861 - DNA, 80 bp, synthetic construct; identical to SEQ ID NO: 36795
  source 1..80: mol_type = other DNA

SEQ ID NO: 70862 - DNA, 80 bp, synthetic construct; identical to SEQ ID NO: 36796
  source 1..80: mol_type = other DNA

SEQ ID NO: 70863 - DNA, 80 bp, synthetic construct; identical to SEQ ID NO: 36797
  source 1..80: mol_type = other DNA

SEQ ID NO: 70864 - DNA, 80 bp, synthetic construct; identical to SEQ ID NO: 13080
  source 1..80: mol_type = other DNA

SEQ ID NO: 70865 - DNA, 80 bp, synthetic construct; identical to SEQ ID NO: 36799
  source 1..80: mol_type = other DNA

SEQ ID NO: 70866 - DNA, 80 bp, synthetic construct; identical to SEQ ID NO: 36800
  source 1..80: mol_type = other DNA

SEQ ID NO: 70867 - DNA, 80 bp, synthetic construct; identical to SEQ ID NO: 13081
  source 1..80: mol_type = other DNA

SEQ ID NO: 70868 - DNA, 80 bp, synthetic construct; identical to SEQ ID NO: 36802
  source 1..80: mol_type = other DNA

SEQ ID NO: 70869 - DNA, 80 bp, synthetic construct; identical to SEQ ID NO: 36803
  source 1..80: mol_type = other DNA

SEQ ID NO: 70870 - DNA, 80 bp, synthetic construct; identical to SEQ ID NO: 36804
  source 1..80: mol_type = other DNA

SEQ ID NO: 70871 - DNA, 80 bp, synthetic construct; identical to SEQ ID NO: 13082
  source 1..80: mol_type = other DNA

SEQ ID NO: 70872 - DNA, 80 bp, synthetic construct; identical to SEQ ID NO: 36806
  source 1..80: mol_type = other DNA

SEQ ID NO: 70873 - DNA, 80 bp, synthetic construct; identical to SEQ ID NO: 36807
  source 1..80: mol_type = other DNA

SEQ ID NO: 70874 - DNA, 80 bp, synthetic construct; identical to SEQ ID NO: 36808
  source 1..80: mol_type = other DNA

SEQ ID NO: 70875 - DNA, 80 bp, synthetic construct; identical to SEQ ID NO: 36809
  source 1..80: mol_type = other DNA

SEQ ID NO: 70876 - DNA, 80 bp, synthetic construct; identical to SEQ ID NO: 13083
  source 1..80: mol_type = other DNA

SEQ ID NO: 70877 - DNA, 80 bp, synthetic construct; identical to SEQ ID NO: 36811
  source 1..80: mol_type = other DNA

SEQ ID NO: 70878 - DNA, 80 bp, synthetic construct; identical to SEQ ID NO: 36812
  source 1..80: mol_type = other DNA

SEQ ID NO: 70879 - DNA, 80 bp, synthetic construct; identical to SEQ ID NO: 13084
  source 1..80: mol_type = other DNA

SEQ ID NO: 70880 - DNA, 80 bp, synthetic construct; identical to SEQ ID NO: 36814
  source 1..80: mol_type = other DNA

SEQ ID NO: 70881 - DNA, 80 bp, synthetic construct; identical to SEQ ID NO: 36815
  source 1..80: mol_type = other DNA

SEQ ID NO: 70882 - DNA, 80 bp, synthetic construct; identical to SEQ ID NO: 36816
  source 1..80: mol_type = other DNA

SEQ ID NO: 70883 - DNA, 80 bp, synthetic construct; identical to SEQ ID NO: 13085
  source 1..80: mol_type = other DNA

SEQ ID NO: 70884 - DNA, 80 bp, synthetic construct; identical to SEQ ID NO: 36818
  source 1..80: mol_type = other DNA

SEQ ID NO: 70885 - DNA, 80 bp, synthetic construct; identical to SEQ ID NO: 36819
  source 1..80: mol_type = other DNA

SEQ ID NO: 70886 - DNA, 80 bp, synthetic construct; identical to SEQ ID NO: 36820
  source 1..80: mol_type = other DNA

SEQ ID NO: 70887 - DNA, 80 bp, synthetic construct; identical to SEQ ID NO: 36821
  source 1..80: mol_type = other DNA

SEQ ID NO: 70888 - DNA, 80 bp, synthetic construct; identical to SEQ ID NO: 36822
  source 1..80: mol_type = other DNA

SEQ ID NO: 70889 - DNA, 80 bp, synthetic construct; identical to SEQ ID NO: 36823
  source 1..80: mol_type = other DNA

SEQ ID NO: 70890 - DNA, 80 bp, synthetic construct; identical to SEQ ID NO: 13086
  source 1..80: mol_type = other DNA

SEQ ID NO: 70891 - DNA, 80 bp, synthetic construct; identical to SEQ ID NO: 36825
  source 1..80: mol_type = other DNA

SEQ ID NO: 70892 - DNA, 80 bp, synthetic construct; identical to SEQ ID NO: 13087
  source 1..80: mol_type = other DNA

SEQ ID NO: 70893 - DNA, 80 bp, synthetic construct; identical to SEQ ID NO: 36827
  source 1..80: mol_type = other DNA

SEQ ID NO: 70894 - DNA, 80 bp, synthetic construct; identical to SEQ ID NO: 36828
  source 1..80: mol_type = other DNA

SEQ ID NO: 70895 - DNA, 80 bp, synthetic construct; identical to SEQ ID NO: 36829
  source 1..80: mol_type = other DNA

SEQ ID NO: 70896 - DNA, 80 bp, synthetic construct; identical to SEQ ID NO: 13088
  source 1..80: mol_type = other DNA

SEQ ID NO: 70897 - DNA, 80 bp, synthetic construct; identical to SEQ ID NO: 36831
  source 1..80: mol_type = other DNA

SEQ ID NO: 70898 - DNA, 80 bp, synthetic construct; identical to SEQ ID NO: 36832
  source 1..80: mol_type = other DNA

SEQ ID NO: 70899 - DNA, 80 bp, synthetic construct; identical to SEQ ID NO: 36833
  source 1..80: mol_type = other DNA

SEQ ID NO: 70900 - DNA, 80 bp, synthetic construct; identical to SEQ ID NO: 36834
  source 1..80: mol_type = other DNA

SEQ ID NO: 70901 - DNA, 80 bp, synthetic construct; identical to SEQ ID NO: 13089
  source 1..80: mol_type = other DNA

SEQ ID NO: 70902 - DNA, 80 bp, synthetic construct; identical to SEQ ID NO: 36836
  source 1..80: mol_type = other DNA

SEQ ID NO: 70903 - DNA, 80 bp, synthetic construct; identical to SEQ ID NO: 36837
  source 1..80: mol_type = other DNA

SEQ ID NO: 70904 - DNA, 80 bp, synthetic construct; identical to SEQ ID NO: 13090
  source 1..80: mol_type = other DNA

SEQ ID NO: 70905 - DNA, 80 bp, synthetic construct; identical to SEQ ID NO: 36840
  source 1..80: mol_type = other DNA

SEQ ID NO: 70906 - DNA, 80 bp, synthetic construct; identical to SEQ ID NO: 36841
  source 1..80: mol_type = other DNA

SEQ ID NO: 70907 - DNA, 80 bp, synthetic construct; identical to SEQ ID NO: 13091
  source 1..80: mol_type = other DNA

SEQ ID NO: 70908 - DNA, 80 bp, synthetic construct; identical to SEQ ID NO: 36843
  source 1..80: mol_type = other DNA

SEQ ID NO: 70909 - DNA, 80 bp, synthetic construct; identical to SEQ ID NO: 36844
  source 1..80: mol_type = other DNA

SEQ ID NO: 70910 - DNA, 80 bp, synthetic construct; identical to SEQ ID NO: 36845
  source 1..80: mol_type = other DNA

SEQ ID NO: 70911 - DNA, 80 bp, synthetic construct; identical to SEQ ID NO: 13092
  source 1..80: mol_type = other DNA

SEQ ID NO: 70912 - DNA, 80 bp, synthetic construct; identical to SEQ ID NO: 36847
  source 1..80: mol_type = other DNA

SEQ ID NO: 70913 - DNA, 80 bp, synthetic construct; identical to SEQ ID NO: 36848
  source 1..80: mol_type = other DNA

SEQ ID NO: 70914 - DNA, 80 bp, synthetic construct; identical to SEQ ID NO: 36849
  source 1..80: mol_type = other DNA

SEQ ID NO: 70915 - DNA, 80 bp, synthetic construct; identical to SEQ ID NO: 13093
  source 1..80: mol_type = other DNA

SEQ ID NO: 70916 - DNA, 80 bp, synthetic construct; identical to SEQ ID NO: 36851
  source 1..80: mol_type = other DNA

SEQ ID NO: 70917 - DNA, 80 bp, synthetic construct; identical to SEQ ID NO: 36852
  source 1..80: mol_type = other DNA

SEQ ID NO: 70918 - DNA, 80 bp, synthetic construct; identical to SEQ ID NO: 36853
  source 1..80: mol_type = other DNA

SEQ ID NO: 70919 - DNA, 80 bp, synthetic construct; identical to SEQ ID NO: 13094
  source 1..80: mol_type = other DNA

SEQ ID NO: 70920 - DNA, 80 bp, synthetic construct; identical to SEQ ID NO: 36855
  source 1..80: mol_type = other DNA

SEQ ID NO: 70921 - DNA, 80 bp, synthetic construct; identical to SEQ ID NO: 36856
  source 1..80: mol_type = other DNA

SEQ ID NO: 70922 - DNA, 80 bp, synthetic construct; identical to SEQ ID NO: 36857
  source 1..80: mol_type = other DNA

SEQ ID NO: 70923 - DNA, 80 bp, synthetic construct; identical to SEQ ID NO: 13095
  source 1..80: mol_type = other DNA

SEQ ID NO: 70924 - DNA, 80 bp, synthetic construct; identical to SEQ ID NO: 36859
  source 1..80: mol_type = other DNA

SEQ ID NO: 70925 - DNA, 80 bp, synthetic construct; identical to SEQ ID NO: 36860
  source 1..80: mol_type = other DNA

SEQ ID NO: 70926 - DNA, 80 bp, synthetic construct; identical to SEQ ID NO: 36861
  source 1..80: mol_type = other DNA

SEQ ID NO: 70927 - DNA, 80 bp, synthetic construct; identical to SEQ ID NO: 13096
  source 1..80: mol_type = other DNA

SEQ ID NO: 70928 - DNA, 80 bp, synthetic construct; identical to SEQ ID NO: 36864
  source 1..80: mol_type = other DNA

SEQ ID NO: 70929 - DNA, 80 bp, synthetic construct; identical to SEQ ID NO: 36865
  source 1..80: mol_type = other DNA

SEQ ID NO: 70930 - DNA, 80 bp, synthetic construct; identical to SEQ ID NO: 13097
  source 1..80: mol_type = other DNA

SEQ ID NO: 70931 - DNA, 80 bp, synthetic construct; identical to SEQ ID NO: 36867
  source 1..80: mol_type = other DNA

SEQ ID NO: 70932 - DNA, 80 bp, synthetic construct; identical to SEQ ID NO: 36868
  source 1..80: mol_type = other DNA

SEQ ID NO: 70933 - DNA, 80 bp, synthetic construct; identical to SEQ ID NO: 36869
  source 1..80: mol_type = other DNA

SEQ ID NO: 70934 - DNA, 80 bp, synthetic construct; identical to SEQ ID NO: 36870
  source 1..80: mol_type = other DNA

SEQ ID NO: 70935 - DNA, 80 bp, synthetic construct; identical to SEQ ID NO: 13098
  source 1..80: mol_type = other DNA

SEQ ID NO: 70936 - DNA, 80 bp, synthetic construct; identical to SEQ ID NO: 36872
  source 1..80: mol_type = other DNA

SEQ ID NO: 70937 - DNA, 80 bp, synthetic construct; identical to SEQ ID NO: 36873
  source 1..80: mol_type = other DNA

SEQ ID NO: 70938 - DNA, 80 bp, synthetic construct; identical to SEQ ID NO: 13099
  source 1..80: mol_type = other DNA

SEQ ID NO: 70939 - DNA, 80 bp, synthetic construct; identical to SEQ ID NO: 36875
  source 1..80: mol_type = other DNA

SEQ ID NO: 70940 - DNA, 80 bp, synthetic construct; identical to SEQ ID NO: 36876
  source 1..80: mol_type = other DNA

SEQ ID NO: 70941 - DNA, 80 bp, synthetic construct; identical to SEQ ID NO: 36877
  source 1..80: mol_type = other DNA

SEQ ID NO: 70942 - DNA, 80 bp, synthetic construct; identical to SEQ ID NO: 36878
  source 1..80: mol_type = other DNA

SEQ ID NO: 70943 - DNA, 80 bp, synthetic construct; identical to SEQ ID NO: 13100
  source 1..80: mol_type = other DNA

SEQ ID NO: 70944 - DNA, 80 bp, synthetic construct; identical to SEQ ID NO: 36880
  source 1..80: mol_type = other DNA

SEQ ID NO: 70945 - DNA, 80 bp, synthetic construct; identical to SEQ ID NO: 36881
  source 1..80: mol_type = other DNA

SEQ ID NO: 70946 - DNA, 80 bp, synthetic construct; identical to SEQ ID NO: 36882
  source 1..80: mol_type = other DNA

SEQ ID NO: 70947 - DNA, 80 bp, synthetic construct; identical to SEQ ID NO: 13101
  source 1..80: mol_type = other DNA

SEQ ID NO: 70948 - DNA, 80 bp, synthetic construct; identical to SEQ ID NO: 36884
  source 1..80: mol_type = other DNA

SEQ ID NO: 70949 - DNA, 80 bp, synthetic construct; identical to SEQ ID NO: 13102
  source 1..80: mol_type = other DNA

SEQ ID NO: 70950 - DNA, 80 bp, synthetic construct; identical to SEQ ID NO: 36886
  source 1..80: mol_type = other DNA

SEQ ID NO: 70951 - DNA, 80 bp, synthetic construct; identical to SEQ ID NO: 36887
  source 1..80: mol_type = other DNA

SEQ ID NO: 70952 - DNA, 80 bp, synthetic construct; identical to SEQ ID NO: 36888
  source 1..80: mol_type = other DNA

SEQ ID NO: 70953 - DNA, 80 bp, synthetic construct; identical to SEQ ID NO: 13103
  source 1..80: mol_type = other DNA

SEQ ID NO: 70954 - DNA, 80 bp, synthetic construct; identical to SEQ ID NO: 36891
  source 1..80: mol_type = other DNA

SEQ ID NO: 70955 - DNA, 80 bp, synthetic construct; identical to SEQ ID NO: 36892
  source 1..80: mol_type = other DNA

SEQ ID NO: 70956 - DNA, 80 bp, synthetic construct; identical to SEQ ID NO: 36893
  source 1..80: mol_type = other DNA

SEQ ID NO: 70957 - DNA, 80 bp, synthetic construct; identical to SEQ ID NO: 13104
  source 1..80: mol_type = other DNA

SEQ ID NO: 70958 - DNA, 80 bp, synthetic construct; identical to SEQ ID NO: 36895
  source 1..80: mol_type = other DNA

SEQ ID NO: 70959 - DNA, 80 bp, synthetic construct; identical to SEQ ID NO: 36896
  source 1..80: mol_type = other DNA

SEQ ID NO: 70960 - DNA, 80 bp, synthetic construct; identical to SEQ ID NO: 36897
  source 1..80: mol_type = other DNA

SEQ ID NO: 70961 - DNA, 80 bp, synthetic construct; identical to SEQ ID NO: 13105
  source 1..80: mol_type = other DNA

SEQ ID NO: 70962 - DNA, 80 bp, synthetic construct; identical to SEQ ID NO: 36899
  source 1..80: mol_type = other DNA

SEQ ID NO: 70963 - DNA, 80 bp, synthetic construct; identical to SEQ ID NO: 36900
  source 1..80: mol_type = other DNA

SEQ ID NO: 70964 - DNA, 80 bp, synthetic construct; identical to SEQ ID NO: 13106
  source 1..80: mol_type = other DNA

SEQ ID NO: 70965 - DNA, 80 bp, synthetic construct; identical to SEQ ID NO: 36902
  source 1..80: mol_type = other DNA

SEQ ID NO: 70966 - DNA, 80 bp, synthetic construct; identical to SEQ ID NO: 36903
  source 1..80: mol_type = other DNA

SEQ ID NO: 70967 - DNA, 80 bp, synthetic construct; identical to SEQ ID NO: 36904
  source 1..80: mol_type = other DNA

SEQ ID NO: 70968 - DNA, 80 bp, synthetic construct; identical to SEQ ID NO: 36905
  source 1..80: mol_type = other DNA

SEQ ID NO: 70969 - DNA, 80 bp, synthetic construct; identical to SEQ ID NO: 13107
  source 1..80: mol_type = other DNA

SEQ ID NO: 70970 - DNA, 80 bp, synthetic construct; identical to SEQ ID NO: 36907
  source 1..80: mol_type = other DNA

SEQ ID NO: 70971 - DNA, 80 bp, synthetic construct; identical to SEQ ID NO: 36908
  source 1..80: mol_type = other DNA

SEQ ID NO: 70972 - DNA, 80 bp, synthetic construct; identical to SEQ ID NO: 13108
  source 1..80: mol_type = other DNA

SEQ ID NO: 70973 - DNA, 80 bp, synthetic construct; identical to SEQ ID NO: 36910
  source 1..80: mol_type = other DNA

SEQ ID NO: 70974 - DNA, 80 bp, synthetic construct; identical to SEQ ID NO: 36911
  source 1..80: mol_type = other DNA

SEQ ID NO: 70975 - DNA, 80 bp, synthetic construct; identical to SEQ ID NO: 36912
  source 1..80: mol_type = other DNA

SEQ ID NO: 70976 - DNA, 80 bp, synthetic construct; identical to SEQ ID NO: 36913
  source 1..80: mol_type = other DNA

SEQ ID NO: 70977 - DNA, 80 bp, synthetic construct; identical to SEQ ID NO: 13109
  source 1..80: mol_type = other DNA

SEQ ID NO: 70978 - DNA, 80 bp, synthetic construct; identical to SEQ ID NO: 36916
  source 1..80: mol_type = other DNA

SEQ ID NO: 70979 - DNA, 80 bp, synthetic construct; identical to SEQ ID NO: 13110
  source 1..80: mol_type = other DNA

SEQ ID NO: 70980 - DNA, 80 bp, synthetic construct; identical to SEQ ID NO: 36918
  source 1..80: mol_type = other DNA

SEQ ID NO: 70981 - DNA, 80 bp, synthetic construct; identical to SEQ ID NO: 36919
  source 1..80: mol_type = other DNA

SEQ ID NO: 70982 - DNA, 80 bp, synthetic construct; identical to SEQ ID NO: 36920
  source 1..80: mol_type = other DNA

SEQ ID NO: 70983 - DNA, 80 bp, synthetic construct; identical to SEQ ID NO: 13111
  source 1..80: mol_type = other DNA

SEQ ID NO: 70984 - DNA, 80 bp, synthetic construct; identical to SEQ ID NO: 36922
  source 1..80: mol_type = other DNA

SEQ ID NO: 70985 - DNA, 80 bp, synthetic construct; identical to SEQ ID NO: 36923
  source 1..80: mol_type = other DNA

SEQ ID NO: 70986 - DNA, 80 bp, synthetic construct; identical to SEQ ID NO: 36924
  source 1..80: mol_type = other DNA

SEQ ID NO: 70987 - DNA, 80 bp, synthetic construct; identical to SEQ ID NO: 36925
  source 1..80: mol_type = other DNA

SEQ ID NO: 70988 - DNA, 80 bp, synthetic construct; identical to SEQ ID NO: 13112
  source 1..80: mol_type = other DNA

SEQ ID NO: 70989 - DNA, 80 bp, synthetic construct; identical to SEQ ID NO: 36927
  source 1..80: mol_type = other DNA

SEQ ID NO: 70990 - DNA, 80 bp, synthetic construct; identical to SEQ ID NO: 36928
  source 1..80: mol_type = other DNA

SEQ ID NO: 70991 - DNA, 80 bp, synthetic construct; identical to SEQ ID NO: 13113
  source 1..80: mol_type = other DNA

SEQ ID NO: 70992 - DNA, 80 bp, synthetic construct; identical to SEQ ID NO: 36930
  source 1..80: mol_type = other DNA

SEQ ID NO: 70993 - DNA, 80 bp, synthetic construct; identical to SEQ ID NO: 36931
  source 1..80: mol_type = other DNA

SEQ ID NO: 70994 - DNA, 80 bp, synthetic construct; identical to SEQ ID NO: 36932
  source 1..80: mol_type = other DNA

SEQ ID NO: 70995 - DNA, 80 bp, synthetic construct; identical to SEQ ID NO: 36933
  source 1..80: mol_type = other DNA

SEQ ID NO: 70996 - DNA, 80 bp, synthetic construct; identical to SEQ ID NO: 13114
  source 1..80: mol_type = other DNA

SEQ ID NO: 70997 - DNA, 80 bp, synthetic construct; identical to SEQ ID NO: 36935
  source 1..80: mol_type = other DNA

SEQ ID NO: 70998 - DNA, 80 bp, synthetic construct; identical to SEQ ID NO: 36936
  source 1..80: mol_type = other DNA

SEQ ID NO: 70999 - DNA, 80 bp, synthetic construct; identical to SEQ ID NO: 13115
  source 1..80: mol_type = other DNA

SEQ ID NO: 71000 - DNA, 80 bp, synthetic construct; identical to SEQ ID NO: 36938
  source 1..80: mol_type = other DNA

SEQ ID NO: 71001 - DNA, 80 bp, synthetic construct; identical to SEQ ID NO: 36939
  source 1..80: mol_type = other DNA

SEQ ID NO: 71002 - DNA, 80 bp, synthetic construct; identical to SEQ ID NO: 36940
  source 1..80: mol_type = other DNA

SEQ ID NO: 71003 - DNA, 80 bp, synthetic construct; identical to SEQ ID NO: 13116
  source 1..80: mol_type = other DNA

SEQ ID NO: 71004 - DNA, 80 bp, synthetic construct; identical to SEQ ID NO: 36942
  source 1..80: mol_type = other DNA

SEQ ID NO: 71005 - DNA, 80 bp, synthetic construct; identical to SEQ ID NO: 36944
  source 1..80: mol_type = other DNA

SEQ ID NO: 71006 - DNA, 80 bp, synthetic construct; identical to SEQ ID NO: 36945
  source 1..80: mol_type = other DNA

SEQ ID NO: 71007 - DNA, 80 bp, synthetic construct; identical to SEQ ID NO: 13117
  source 1..80: mol_type = other DNA

SEQ ID NO: 71008 - DNA, 80 bp, synthetic construct; identical to SEQ ID NO: 36947
  source 1..80: mol_type = other DNA

SEQ ID NO: 71009 - DNA, 80 bp, synthetic construct; identical to SEQ ID NO: 36948
  source 1..80: mol_type = other DNA

SEQ ID NO: 71010 - DNA, 80 bp, synthetic construct; identical to SEQ ID NO: 36949
  source 1..80: mol_type = other DNA

SEQ ID NO: 71011 - DNA, 80 bp, synthetic construct; identical to SEQ ID NO: 13118
  source 1..80: mol_type = other DNA

SEQ ID NO: 71012 - DNA, 80 bp, synthetic construct; identical to SEQ ID NO: 36951
  source 1..80: mol_type = other DNA

SEQ ID NO: 71013 - DNA, 80 bp, synthetic construct; identical to SEQ ID NO: 36952
  source 1..80: mol_type = other DNA

SEQ ID NO: 71014 - DNA, 80 bp, synthetic construct; identical to SEQ ID NO: 36953
  source 1..80: mol_type = other DNA

SEQ ID NO: 71015 - DNA, 80 bp, synthetic construct; identical to SEQ ID NO: 13119
  source 1..80: mol_type = other DNA

SEQ ID NO: 71016 - DNA, 80 bp, synthetic construct; identical to SEQ ID NO: 36955
  source 1..80: mol_type = other DNA

SEQ ID NO: 71017 - DNA, 80 bp, synthetic construct; identical to SEQ ID NO: 36956
  source 1..80: mol_type = other DNA

SEQ ID NO: 71018 - DNA, 80 bp, synthetic construct; identical to SEQ ID NO: 36957
  source 1..80: mol_type = other DNA

SEQ ID NO: 71019 - DNA, 80 bp, synthetic construct; identical to SEQ ID NO: 13120
  source 1..80: mol_type = other DNA

SEQ ID NO: 71020 - DNA, 80 bp, synthetic construct; identical to SEQ ID NO: 36959
  source 1..80: mol_type = other DNA

SEQ ID NO: 71021 - DNA, 80 bp, synthetic construct; identical to SEQ ID NO: 36960
  source 1..80: mol_type = other DNA

SEQ ID NO: 71022 - DNA, 80 bp, synthetic construct; identical to SEQ ID NO: 36961
  source 1..80: mol_type = other DNA

SEQ ID NO: 71023 - DNA, 80 bp, synthetic construct; identical to SEQ ID NO: 13121
  source 1..80: mol_type = other DNA

SEQ ID NO: 71024 - DNA, 80 bp, synthetic construct; identical to SEQ ID NO: 36963
  source 1..80: mol_type = other DNA

SEQ ID NO: 71025 - DNA, 80 bp, synthetic construct; identical to SEQ ID NO: 36964
  source 1..80: mol_type = other DNA

SEQ ID NO: 71026 - DNA, 80 bp, synthetic construct; identical to SEQ ID NO: 36965
  source 1..80: mol_type = other DNA

SEQ ID NO: 71027 - DNA, 80 bp, synthetic construct; identical to SEQ ID NO: 36966
  source 1..80: mol_type = other DNA

SEQ ID NO: 71028 - DNA, 80 bp, synthetic construct; identical to SEQ ID NO: 13122
  source 1..80: mol_type = other DNA

SEQ ID NO: 71029 - DNA, 80 bp, synthetic construct; identical to SEQ ID NO: 36968
  source 1..80: mol_type = other DNA

SEQ ID NO: 71030 - DNA, 80 bp, synthetic construct; identical to SEQ ID NO: 36969
  source 1..80: mol_type = other DNA

SEQ ID NO: 71031 - DNA, 80 bp, synthetic construct; identical to SEQ ID NO: 36970
  source 1..80: mol_type = other DNA

SEQ ID NO: 71032 - DNA, 80 bp, synthetic construct; identical to SEQ ID NO: 13123
  source 1..80: mol_type = other DNA

SEQ ID NO: 71033 - DNA, 80 bp, synthetic construct; identical to SEQ ID NO: 36972
  source 1..80: mol_type = other DNA

SEQ ID NO: 71034 - DNA, 80 bp, synthetic construct; identical to SEQ ID NO: 13124
  source 1..80: mol_type = other DNA

SEQ ID NO: 71035 - DNA, 80 bp, synthetic construct; identical to SEQ ID NO: 36974
  source 1..80: mol_type = other DNA

SEQ ID NO: 71036 - DNA, 80 bp, synthetic construct; identical to SEQ ID NO: 36975
  source 1..80: mol_type = other DNA

SEQ ID NO: 71037 - DNA, 80 bp, synthetic construct; identical to SEQ ID NO: 36976
  source 1..80: mol_type = other DNA

SEQ ID NO: 71038 - DNA, 80 bp, synthetic construct; identical to SEQ ID NO: 13125
  source 1..80: mol_type = other DNA

SEQ ID NO: 71039 - DNA, 80 bp, synthetic construct; identical to SEQ ID NO: 36978
  source 1..80: mol_type = other DNA

SEQ ID NO: 71040 - DNA, 80 bp, synthetic construct; identical to SEQ ID NO: 36979
  source 1..80: mol_type = other DNA

SEQ ID NO: 71041 - DNA, 80 bp, synthetic construct; identical to SEQ ID NO: 13126
  source 1..80: mol_type = other DNA

SEQ ID NO: 71042 - DNA, 80 bp, synthetic construct; identical to SEQ ID NO: 36981
  source 1..80: mol_type = other DNA

SEQ ID NO: 71043 - DNA, 80 bp, synthetic construct; identical to SEQ ID NO: 36982
  source 1..80: mol_type = other DNA

SEQ ID NO: 71044 - DNA, 80 bp, synthetic construct; identical to SEQ ID NO: 36983
  source 1..80: mol_type = other DNA

SEQ ID NO: 71045 - DNA, 80 bp, synthetic construct; identical to SEQ ID NO: 36984
  source 1..80: mol_type = other DNA

SEQ ID NO: 71046 - DNA, 80 bp, synthetic construct; identical to SEQ ID NO: 13127
  source 1..80: mol_type = other DNA

SEQ ID NO: 71047 - DNA, 80 bp, synthetic construct; identical to SEQ ID NO: 36986
  source 1..80: mol_type = other DNA

SEQ ID NO: 71048 - DNA, 80 bp, synthetic construct; identical to SEQ ID NO: 36987
  source 1..80: mol_type = other DNA

SEQ ID NO: 71049 - DNA, 80 bp, synthetic construct; identical to SEQ ID NO: 13128
  source 1..80: mol_type = other DNA

SEQ ID NO: 71050 - DNA, 80 bp, synthetic construct; identical to SEQ ID NO: 36989
  source 1..80: mol_type = other DNA

SEQ ID NO: 71051 - DNA, 80 bp, synthetic construct; identical to SEQ ID NO: 36990
  source 1..80: mol_type = other DNA

SEQ ID NO: 71052 - DNA, 80 bp, synthetic construct; identical to SEQ ID NO: 36991
  source 1..80: mol_type = other DNA

SEQ ID NO: 71053 - DNA, 80 bp, synthetic construct; identical to SEQ ID NO: 36992
  source 1..80: mol_type = other DNA

SEQ ID NO: 71054 - DNA, 80 bp, synthetic construct; identical to SEQ ID NO: 13129
  source 1..80: mol_type = other DNA

SEQ ID NO: 71055 - DNA, 80 bp, synthetic construct; identical to SEQ ID NO: 36994
  source 1..80: mol_type = other DNA

SEQ ID NO: 71056 - DNA, 80 bp, synthetic construct; identical to SEQ ID NO: 36995
  source 1..80: mol_type = other DNA

SEQ ID NO: 71057 - DNA, 80 bp, synthetic construct; identical to SEQ ID NO: 36996
  source 1..80: mol_type = other DNA

SEQ ID NO: 71058 - DNA, 80 bp, synthetic construct; identical to SEQ ID NO: 13130
  source 1..80: mol_type = other DNA

SEQ ID NO: 71059 - DNA, 80 bp, synthetic construct; identical to SEQ ID NO: 36998
  source 1..80: mol_type = other DNA

SEQ ID NO: 71060 - DNA, 80 bp, synthetic construct; identical to SEQ ID NO: 36999
  source 1..80: mol_type = other DNA

SEQ ID NO: 71061 - DNA, 80 bp, synthetic construct; identical to SEQ ID NO: 13131
  source 1..80: mol_type = other DNA

SEQ ID NO: 71062 - DNA, 80 bp, synthetic construct; identical to SEQ ID NO: 37001
  source 1..80: mol_type = other DNA

SEQ ID NO: 71063 - DNA, 80 bp, synthetic construct; identical to SEQ ID NO: 37002
  source 1..80: mol_type = other DNA

SEQ ID NO: 71064 - DNA, 80 bp, synthetic construct; identical to SEQ ID NO: 37003
  source 1..80: mol_type = other DNA

SEQ ID NO: 71065 - DNA, 80 bp, synthetic construct; identical to SEQ ID NO: 13132
  source 1..80: mol_type = other DNA

SEQ ID NO: 71066 - DNA, 80 bp, synthetic construct; identical to SEQ ID NO: 37005
  source 1..80: mol_type = other DNA

SEQ ID NO: 71067 - DNA, 80 bp, synthetic construct; identical to SEQ ID NO: 37006
  source 1..80: mol_type = other DNA

SEQ ID NO: 71068 - DNA, 80 bp, synthetic construct; identical to SEQ ID NO: 37007
  source 1..80: mol_type = other DNA

SEQ ID NO: 71069 - DNA, 80 bp, synthetic construct; identical to SEQ ID NO: 37008
  source 1..80: mol_type = other DNA

SEQ ID NO: 71070 - DNA, 80 bp, synthetic construct; identical to SEQ ID NO: 13133
  source 1..80: mol_type = other DNA

SEQ ID NO: 71071 - DNA, 80 bp, synthetic construct; identical to SEQ ID NO: 37010
  source 1..80: mol_type = other DNA

SEQ ID NO: 71072 - DNA, 80 bp, synthetic construct; identical to SEQ ID NO: 37011
  source 1..80: mol_type = other DNA

SEQ ID NO: 71073 - DNA, 80 bp, synthetic construct; identical to SEQ ID NO: 13134
  source 1..80: mol_type = other DNA

SEQ ID NO: 71074 - DNA, 80 bp, synthetic construct; identical to SEQ ID NO: 37013
  source 1..80: mol_type = other DNA

SEQ ID NO: 71075 - DNA, 80 bp, synthetic construct; identical to SEQ ID NO: 37014
  source 1..80: mol_type = other DNA

SEQ ID NO: 71076 - DNA, 80 bp, synthetic construct; identical to SEQ ID NO: 37015
  source 1..80: mol_type = other DNA

SEQ ID NO: 71077 - DNA, 80 bp, synthetic construct; identical to SEQ ID NO: 13135
  source 1..80: mol_type = other DNA

SEQ ID NO: 71078 - DNA, 80 bp, synthetic construct; identical to SEQ ID NO: 37017
  source 1..80: mol_type = other DNA

SEQ ID NO: 71079 - DNA, 80 bp, synthetic construct; identical to SEQ ID NO: 37018
  source 1..80: mol_type = other DNA

SEQ ID NO: 71080 - DNA, 80 bp, synthetic construct; identical to SEQ ID NO: 37019
  source 1..80: mol_type = other DNA

SEQ ID NO: 71081 - DNA, 80 bp, synthetic construct; identical to SEQ ID NO: 13136
  source 1..80: mol_type = other DNA

SEQ ID NO: 71082 - DNA, 80 bp, synthetic construct; identical to SEQ ID NO: 37021
  source 1..80: mol_type = other DNA

SEQ ID NO: 71083 - DNA, 80 bp, synthetic construct; identical to SEQ ID NO: 37022
  source 1..80: mol_type = other DNA

SEQ ID NO: 71084 - DNA, 80 bp, synthetic construct; identical to SEQ ID NO: 37023
  source 1..80: mol_type = other DNA

SEQ ID NO: 71085 - DNA, 80 bp, synthetic construct; identical to SEQ ID NO: 37024
  source 1..80: mol_type = other DNA

SEQ ID NO: 71086 - DNA, 80 bp, synthetic construct; identical to SEQ ID NO: 37025
  source 1..80: mol_type = other DNA

SEQ ID NO: 71087 - DNA, 80 bp, synthetic construct; identical to SEQ ID NO: 13137
  source 1..80: mol_type = other DNA

SEQ ID NO: 71088 - DNA, 80 bp, synthetic construct; identical to SEQ ID NO: 37027
  source 1..80: mol_type = other DNA

SEQ ID NO: 71089 - DNA, 80 bp, synthetic construct; identical to SEQ ID NO: 37028
  source 1..80: mol_type = other DNA

SEQ ID NO: 71090 - DNA, 80 bp, synthetic construct; identical to SEQ ID NO: 13138
  source 1..80: mol_type = other DNA

SEQ ID NO: 71091 - DNA, 80 bp, synthetic construct; identical to SEQ ID NO: 37030
  source 1..80: mol_type = other DNA

SEQ ID NO: 71092 - DNA, 80 bp, synthetic construct; identical to SEQ ID NO: 37031
  source 1..80: mol_type = other DNA

SEQ ID NO: 71093 - DNA, 80 bp, synthetic construct; identical to SEQ ID NO: 37032
  source 1..80: mol_type = other DNA

SEQ ID NO: 71094 - DNA, 80 bp, synthetic construct; identical to SEQ ID NO: 37033
  source 1..80: mol_type = other DNA

SEQ ID NO: 71095 - DNA, 80 bp, synthetic construct; identical to SEQ ID NO: 13139
  source 1..80: mol_type = other DNA

SEQ ID NO: 71096 - DNA, 80 bp, synthetic construct; identical to SEQ ID NO: 37035
  source 1..80: mol_type = other DNA

SEQ ID NO: 71097 - DNA, 80 bp, synthetic construct; identical to SEQ ID NO: 37036
  source 1..80: mol_type = other DNA

SEQ ID NO: 71098 - DNA, 80 bp, synthetic construct; identical to SEQ ID NO: 13140
  source 1..80: mol_type = other DNA

SEQ ID NO: 71099 - DNA, 80 bp, synthetic construct; identical to SEQ ID NO: 37038
  source 1..80: mol_type = other DNA

SEQ ID NO: 71100 - DNA, 80 bp, synthetic construct; identical to SEQ ID NO: 37039
  source 1..80: mol_type = other DNA

SEQ ID NO: 71101 - DNA, 80 bp, synthetic construct; identical to SEQ ID NO: 37040
  source 1..80: mol_type = other DNA

SEQ ID NO: 71102 - DNA, 80 bp, synthetic construct; identical to SEQ ID NO: 37041
  source 1..80: mol_type = other DNA

SEQ ID NO: 71103 - DNA, 80 bp, synthetic construct; identical to SEQ ID NO: 13141
  source 1..80: mol_type = other DNA

SEQ ID NO: 71104 - DNA, 80 bp, synthetic construct; identical to SEQ ID NO: 37043
  source 1..80: mol_type = other DNA

SEQ ID NO: 71105 - DNA, 80 bp, synthetic construct; identical to SEQ ID NO: 37044
  source 1..80: mol_type = other DNA

SEQ ID NO: 71106 - DNA, 80 bp, synthetic construct; identical to SEQ ID NO: 13142
  source 1..80: mol_type = other DNA

SEQ ID NO: 71107 - DNA, 80 bp, synthetic construct; identical to SEQ ID NO: 37046
  source 1..80: mol_type = other DNA

SEQ ID NO: 71108 - DNA, 80 bp, synthetic construct; identical to SEQ ID NO: 37047
  source 1..80: mol_type = other DNA

SEQ ID NO: 71109 - DNA, 80 bp, synthetic construct; identical to SEQ ID NO: 37048
  source 1..80: mol_type = other DNA

SEQ ID NO: 71110 - DNA, 80 bp, synthetic construct; identical to SEQ ID NO: 37049
  source 1..80: mol_type = other DNA

SEQ ID NO: 71111 - DNA, 80 bp, synthetic construct; identical to SEQ ID NO: 13143
  source 1..80: mol_type = other DNA

SEQ ID NO: 71112 - DNA, 80 bp, synthetic construct; identical to SEQ ID NO: 37051
  source 1..80: mol_type = other DNA

SEQ ID NO: 71113 - DNA, 80 bp, synthetic construct; identical to SEQ ID NO: 37052
  source 1..80: mol_type = other DNA

SEQ ID NO: 71114 - DNA, 80 bp, synthetic construct; identical to SEQ ID NO: 37053
  source 1..80: mol_type = other DNA

SEQ ID NO: 71115 - DNA, 80 bp, synthetic construct; identical to SEQ ID NO: 13144
  source 1..80: mol_type = other DNA

SEQ ID NO: 71116 - DNA, 80 bp, synthetic construct; identical to SEQ ID NO: 37055
  source 1..80: mol_type = other DNA

SEQ ID NO: 71117 - DNA, 80 bp, synthetic construct; identical to SEQ ID NO: 37056
  source 1..80: mol_type = other DNA

SEQ ID NO: 71118 - DNA, 80 bp, synthetic construct; identical to SEQ ID NO: 13145
  source 1..80: mol_type = other DNA

SEQ ID NO: 71119 - DNA, 80 bp, synthetic construct; identical to SEQ ID NO: 37058
  source 1..80: mol_type = other DNA

SEQ ID NO: 71120 - DNA, 80 bp, synthetic construct; identical to SEQ ID NO: 37059
  source 1..80: mol_type = other DNA

SEQ ID NO: 71121 - DNA, 80 bp, synthetic construct; identical to SEQ ID NO: 37060
  source 1..80: mol_type = other DNA

SEQ ID NO: 71122 - DNA, 80 bp, synthetic construct; identical to SEQ ID NO: 37061
  source 1..80: mol_type = other DNA

SEQ ID NO: 71123 - DNA, 80 bp, synthetic construct; identical to SEQ ID NO: 13146
  source 1..80: mol_type = other DNA

SEQ ID NO: 71124 - DNA, 80 bp, synthetic construct; identical to SEQ ID NO: 37063
  source 1..80: mol_type = other DNA

SEQ ID NO: 71125 - DNA, 80 bp, synthetic construct; identical to SEQ ID NO: 37064
  source 1..80: mol_type = other DNA

SEQ ID NO: 71126 - DNA, 80 bp, synthetic construct; identical to SEQ ID NO: 13147
  source 1..80: mol_type = other DNA

SEQ ID NO: 71127 - DNA, 80 bp, synthetic construct; identical to SEQ ID NO: 37066
  source 1..80: mol_type = other DNA

SEQ ID NO: 71128 - DNA, 80 bp, synthetic construct; identical to SEQ ID NO: 37067
  source 1..80: mol_type = other DNA

SEQ ID NO: 71129 - DNA, 80 bp, synthetic construct; identical to SEQ ID NO: 37068
  source 1..80: mol_type = other DNA

SEQ ID NO: 71130 - DNA, 80 bp, synthetic construct; identical to SEQ ID NO: 37069
  source 1..80: mol_type = other DNA

SEQ ID NO: 71131 - DNA, 80 bp, synthetic construct; identical to SEQ ID NO: 13148
  source 1..80: mol_type = other DNA

SEQ ID NO: 71132 - DNA, 80 bp, synthetic construct; identical to SEQ ID NO: 37071
  source 1..80: mol_type = other DNA

SEQ ID NO: 71133 - DNA, 80 bp, synthetic construct; identical to SEQ ID NO: 37072
  source 1..80: mol_type = other DNA

SEQ ID NO: 71134 - DNA, 80 bp, synthetic construct; identical to SEQ ID NO: 37073
  source 1..80: mol_type = other DNA

SEQ ID NO: 71135 - DNA, 80 bp, synthetic construct; identical to SEQ ID NO: 13149
  source 1..80: mol_type = other DNA

SEQ ID NO: 71136 - DNA, 80 bp, synthetic construct; identical to SEQ ID NO: 37075
  source 1..80: mol_type = other DNA

SEQ ID NO: 71137 - DNA, 80 bp, synthetic construct; identical to SEQ ID NO: 37076
  source 1..80: mol_type = other DNA

SEQ ID NO: 71138 - DNA, 80 bp, synthetic construct; identical to SEQ ID NO: 37077
  source 1..80: mol_type = other DNA

SEQ ID NO: 71139 - DNA, 80 bp, synthetic construct; identical to SEQ ID NO: 13150
  source 1..80: mol_type = other DNA

SEQ ID NO: 71140 - DNA, 80 bp, synthetic construct; identical to SEQ ID NO: 37079
  source 1..80: mol_type = other DNA

SEQ ID NO: 71141 - DNA, 80 bp, synthetic construct; identical to SEQ ID NO: 37080
  source 1..80: mol_type = other DNA

SEQ ID NO: 71142 - DNA, 80 bp, synthetic construct; identical to SEQ ID NO: 37081
  source 1..80: mol_type = other DNA

SEQ ID NO: 71143 - DNA, 80 bp, synthetic construct; identical to SEQ ID NO: 13151
  source 1..80: mol_type = other DNA

SEQ ID NO: 71144 - DNA, 80 bp, synthetic construct; identical to SEQ ID NO: 37083
  source 1..80: mol_type = other DNA

SEQ ID NO: 71145 - DNA, 80 bp, synthetic construct; identical to SEQ ID NO: 37084
  source 1..80: mol_type = other DNA

SEQ ID NO: 71146 - DNA, 80 bp, synthetic construct; identical to SEQ ID NO: 13152
  source 1..80: mol_type = other DNA

SEQ ID NO: 71147 - DNA, 80 bp, synthetic construct; identical to SEQ ID NO: 37086
  source 1..80: mol_type = other DNA

SEQ ID NO: 71148 - DNA, 80 bp, synthetic construct; identical to SEQ ID NO: 37087
  source 1..80: mol_type = other DNA

SEQ ID NO: 71149 - DNA, 80 bp, synthetic construct; identical to SEQ ID NO: 37088
  source 1..80: mol_type = other DNA

SEQ ID NO: 71150 - DNA, 80 bp, synthetic construct; identical to SEQ ID NO: 37089
  source 1..80: mol_type = other DNA

SEQ ID NO: 71151 - DNA, 80 bp, synthetic construct; identical to SEQ ID NO: 13153
  source 1..80: mol_type = other DNA

SEQ ID NO: 71152 - DNA, 80 bp, synthetic construct; identical to SEQ ID NO: 37091
  source 1..80: mol_type = other DNA

SEQ ID NO: 71153 - DNA, 80 bp, synthetic construct; identical to SEQ ID NO: 37092
  source 1..80: mol_type = other DNA

SEQ ID NO: 71154 - DNA, 80 bp, synthetic construct; identical to SEQ ID NO: 37093
  source 1..80: mol_type = other DNA

SEQ ID NO: 71155 - DNA, 80 bp, synthetic construct; identical to SEQ ID NO: 13154
  source 1..80: mol_type = other DNA

SEQ ID NO: 71156 - DNA, 80 bp, synthetic construct; identical to SEQ ID NO: 37095
  source 1..80: mol_type = other DNA

SEQ ID NO: 71157 - DNA, 80 bp, synthetic construct; identical to SEQ ID NO: 37096
  source 1..80: mol_type = other DNA

SEQ ID NO: 71158 - DNA, 80 bp, synthetic construct; identical to SEQ ID NO: 37097
  source 1..80: mol_type = other DNA

SEQ ID NO: 71159 - DNA, 80 bp, synthetic construct; identical to SEQ ID NO: 13155
  source 1..80: mol_type = other DNA

SEQ ID NO: 71160 - DNA, 80 bp, synthetic construct; identical to SEQ ID NO: 37099
  source 1..80: mol_type = other DNA

SEQ ID NO: 71161 - DNA, 80 bp, synthetic construct; identical to SEQ ID NO: 37100
  source 1..80: mol_type = other DNA

SEQ ID NO: 71162 - DNA, 80 bp, synthetic construct; identical to SEQ ID NO: 13156
  source 1..80: mol_type = other DNA

SEQ ID NO: 71163 - DNA, 80 bp, synthetic construct; identical to SEQ ID NO: 37102
  source 1..80: mol_type = other DNA

SEQ ID NO: 71164 - DNA, 80 bp, synthetic construct; identical to SEQ ID NO: 37103
  source 1..80: mol_type = other DNA

SEQ ID NO: 71165 - DNA, 80 bp, synthetic construct; identical to SEQ ID NO: 37104
  source 1..80: mol_type = other DNA

SEQ ID NO: 71166 - DNA, 80 bp, synthetic construct; identical to SEQ ID NO: 13157
  source 1..80: mol_type = other DNA

SEQ ID NO: 71167 - DNA, 80 bp, synthetic construct; identical to SEQ ID NO: 37106
  source 1..80: mol_type = other DNA

SEQ ID NO: 71168 - DNA, 80 bp, synthetic construct; identical to SEQ ID NO: 37107
  source 1..80: mol_type = other DNA

SEQ ID NO: 71169 - DNA, 80 bp, synthetic construct; identical to SEQ ID NO: 37108
  source 1..80: mol_type = other DNA

SEQ ID NO: 71170 - DNA, 80 bp, synthetic construct; identical to SEQ ID NO: 13158
  source 1..80: mol_type = other DNA

SEQ ID NO: 71171 - DNA, 80 bp, synthetic construct; identical to SEQ ID NO: 37110
  source 1..80: mol_type = other DNA

SEQ ID NO: 71172 - DNA, 80 bp, synthetic construct; identical to SEQ ID NO: 37111
  source 1..80: mol_type = other DNA

SEQ ID NO: 71173 - DNA, 80 bp, synthetic construct; identical to SEQ ID NO: 37112
  source 1..80: mol_type = other DNA

SEQ ID NO: 71174 - DNA, 80 bp, synthetic construct; identical to SEQ ID NO: 37113
  source 1..80: mol_type = other DNA

SEQ ID NO: 71175 - DNA, 80 bp, synthetic construct; identical to SEQ ID NO: 13159
  source 1..80: mol_type = other DNA

SEQ ID NO: 71176 - DNA, 80 bp, synthetic construct; identical to SEQ ID NO: 37115
  source 1..80: mol_type = other DNA

SEQ ID NO: 71177 - DNA, 80 bp, synthetic construct; identical to SEQ ID NO: 37116
  source 1..80: mol_type = other DNA

SEQ ID NO: 71178 - DNA, 80 bp, synthetic construct; identical to SEQ ID NO: 13160
  source 1..80: mol_type = other DNA

SEQ ID NO: 71179 - DNA, 80 bp, synthetic construct; identical to SEQ ID NO: 37118
  source 1..80: mol_type = other DNA

SEQ ID NO: 71180 - DNA, 80 bp, synthetic construct; identical to SEQ ID NO: 37119
  source 1..80: mol_type = other DNA

SEQ ID NO: 71181 - DNA, 80 bp, synthetic construct; identical to SEQ ID NO: 37120
  source 1..80: mol_type = other DNA

SEQ ID NO: 71182 - DNA, 80 bp, synthetic construct; identical to SEQ ID NO: 13161
  source 1..80: mol_type = other DNA

SEQ ID NO: 71183 - DNA, 80 bp, synthetic construct; identical to SEQ ID NO: 37122
  source 1..80: mol_type = other DNA

SEQ ID NO: 71184 - DNA, 80 bp, synthetic construct; identical to SEQ ID NO: 37123
  source 1..80: mol_type = other DNA

SEQ ID NO: 71185 - DNA, 80 bp, synthetic construct; identical to SEQ ID NO: 37124
  source 1..80: mol_type = other DNA

SEQ ID NO: 71186 - DNA, 80 bp, synthetic construct; identical to SEQ ID NO: 37125
  source 1..80: mol_type = other DNA

SEQ ID NO: 71187 - DNA, 80 bp, synthetic construct; identical to SEQ ID NO: 13162
  source 1..80: mol_type = other DNA

SEQ ID NO: 71188 - DNA, 80 bp, synthetic construct; identical to SEQ ID NO: 37128
  source 1..80: mol_type = other DNA

SEQ ID NO: 71189 - DNA, 80 bp, synthetic construct; identical to SEQ ID NO: 37129
  source 1..80: mol_type = other DNA

SEQ ID NO: 71190 - DNA, 80 bp, synthetic construct; identical to SEQ ID NO: 13163
  source 1..80: mol_type = other DNA

SEQ ID NO: 71191 - DNA, 80 bp, synthetic construct; identical to SEQ ID NO: 37131
  source 1..80: mol_type = other DNA

SEQ ID NO: 71192 - DNA, 80 bp, synthetic construct; identical to SEQ ID NO: 37132
  source 1..80: mol_type = other DNA

SEQ ID NO: 71193 - DNA, 80 bp, synthetic construct; identical to SEQ ID NO: 37133
  source 1..80: mol_type = other DNA

SEQ ID NO: 71194 - DNA, 80 bp, synthetic construct; identical to SEQ ID NO: 13164
  source 1..80: mol_type = other DNA

SEQ ID NO: 71195 - DNA, 80 bp, synthetic construct; identical to SEQ ID NO: 37135
  source 1..80: mol_type = other DNA

SEQ ID NO: 71196 - DNA, 80 bp, synthetic construct; identical to SEQ ID NO: 37136
  source 1..80: mol_type = other DNA

SEQ ID NO: 71197 - DNA, 80 bp, synthetic construct; identical to SEQ ID NO: 13165
  source 1..80: mol_type = other DNA

SEQ ID NO: 71198 - DNA, 80 bp, synthetic construct; identical to SEQ ID NO: 37138
  source 1..80: mol_type = other DNA

SEQ ID NO: 71199 - DNA, 80 bp, synthetic construct; identical to SEQ ID NO: 37139
  source 1..80: mol_type = other DNA

SEQ ID NO: 71200 - DNA, 80 bp, synthetic construct; identical to SEQ ID NO: 37140
  source 1..80: mol_type = other DNA

SEQ ID NO: 71201 - DNA, 80 bp, synthetic construct; identical to SEQ ID NO: 13166
  source 1..80: mol_type = other DNA

SEQ ID NO: 71202 - DNA, 80 bp, synthetic construct; identical to SEQ ID NO: 37142
  source 1..80: mol_type = other DNA

SEQ ID NO: 71203 - DNA, 80 bp, synthetic construct; identical to SEQ ID NO: 37143
  source 1..80: mol_type = other DNA

SEQ ID NO: 71204 - DNA, 80 bp, synthetic construct; identical to SEQ ID NO: 37144
  source 1..80: mol_type = other DNA

SEQ ID NO: 71205 - DNA, 80 bp, synthetic construct; identical to SEQ ID NO: 37145
  source 1..80: mol_type = other DNA

SEQ ID NO: 71206 - DNA, 80 bp, synthetic construct; identical to SEQ ID NO: 13167
  source 1..80: mol_type = other DNA

SEQ ID NO: 71207 - DNA, 80 bp, synthetic construct; identical to SEQ ID NO: 37147
  source 1..80: mol_type = other DNA

SEQ ID NO: 71208 - DNA, 80 bp, synthetic construct; identical to SEQ ID NO: 37148
  source 1..80: mol_type = other DNA

SEQ ID NO: 71209 - DNA, 80 bp, synthetic construct; identical to SEQ ID NO: 13168
  source 1..80: mol_type = other DNA

SEQ ID NO: 71210 - DNA, 80 bp, synthetic construct; identical to SEQ ID NO: 37150
  source 1..80: mol_type = other DNA

SEQ ID NO: 71211 - DNA, 80 bp, synthetic construct; identical to SEQ ID NO: 37151
  source 1..80: mol_type = other DNA

SEQ ID NO: 71212 - DNA, 80 bp, synthetic construct; identical to SEQ ID NO: 37152
  source 1..80: mol_type = other DNA

SEQ ID NO: 71213 - DNA, 80 bp, synthetic construct; identical to SEQ ID NO: 37153
  source 1..80: mol_type = other DNA

SEQ ID NO: 71214 - DNA, 80 bp, synthetic construct; identical to SEQ ID NO: 13169
  source 1..80: mol_type = other DNA

SEQ ID NO: 71215 - DNA, 80 bp, synthetic construct; identical to SEQ ID NO: 37155
  source 1..80: mol_type = other DNA

SEQ ID NO: 71216 - DNA, 80 bp, synthetic construct; identical to SEQ ID NO: 37156
  source 1..80: mol_type = other DNA

SEQ ID NO: 71217 - DNA, 80 bp, synthetic construct; identical to SEQ ID NO: 13170
  source 1..80: mol_type = other DNA

SEQ ID NO: 71218 - DNA, 80 bp, synthetic construct; identical to SEQ ID NO: 37158
  source 1..80: mol_type = other DNA

SEQ ID NO: 71219 - DNA, 80 bp, synthetic construct; identical to SEQ ID NO: 37159
  source 1..80: mol_type = other DNA

SEQ ID NO: 71220 - DNA, 80 bp, synthetic construct; identical to SEQ ID NO: 37160
  source 1..80: mol_type = other DNA

SEQ ID NO: 71221 - DNA, 80 bp, synthetic construct; identical to SEQ ID NO: 13171
  source 1..80: mol_type = other DNA

SEQ ID NO: 71222 - DNA, 80 bp, synthetic construct; identical to SEQ ID NO: 37162
  source 1..80: mol_type = other DNA

SEQ ID NO: 71223 - DNA, 80 bp, synthetic construct; identical to SEQ ID NO: 37163
  source 1..80: mol_type = other DNA

SEQ ID NO: 71224 - DNA, 80 bp, synthetic construct; identical to SEQ ID NO: 37164
  source 1..80: mol_type = other DNA

SEQ ID NO: 71225 - DNA, 80 bp, synthetic construct; identical to SEQ ID NO: 37165
  source 1..80: mol_type = other DNA

SEQ ID NO: 71226 - DNA, 80 bp, synthetic construct; identical to SEQ ID NO: 13172
  source 1..80: mol_type = other DNA

SEQ ID NO: 71227 - DNA, 80 bp, synthetic construct; identical to SEQ ID NO: 37167
  source 1..80: mol_type = other DNA

SEQ ID NO: 71228 - DNA, 80 bp, synthetic construct; identical to SEQ ID NO: 37168
  source 1..80: mol_type = other DNA

SEQ ID NO: 71229 - DNA, 80 bp, synthetic construct; identical to SEQ ID NO: 37169
  source 1..80: mol_type = other DNA

SEQ ID NO: 71230 - DNA, 80 bp, synthetic construct; identical to SEQ ID NO: 13173
  source 1..80: mol_type = other DNA

SEQ ID NO: 71231 - DNA, 80 bp, synthetic construct; identical to SEQ ID NO: 37171
  source 1..80: mol_type = other DNA

SEQ ID NO: 71232 - DNA, 80 bp, synthetic construct; identical to SEQ ID NO: 37172
  source 1..80: mol_type = other DNA

SEQ ID NO: 71233 - DNA, 80 bp, synthetic construct; identical to SEQ ID NO: 13174
  source 1..80: mol_type = other DNA

SEQ ID NO: 71234 - DNA, 80 bp, synthetic construct; identical to SEQ ID NO: 37174
  source 1..80: mol_type = other DNA

SEQ ID NO: 71235 - DNA, 80 bp, synthetic construct; identical to SEQ ID NO: 37175
  source 1..80: mol_type = other DNA

SEQ ID NO: 71236 - DNA, 80 bp, synthetic construct; identical to SEQ ID NO: 37176
  source 1..80: mol_type = other DNA

SEQ ID NO: 71237 - DNA, 80 bp, synthetic construct; identical to SEQ ID NO: 13175
  source 1..80: mol_type = other DNA

SEQ ID NO: 71238 - DNA, 80 bp, synthetic construct; identical to SEQ ID NO: 37178
  source 1..80: mol_type = other DNA

SEQ ID NO: 71239 - DNA, 80 bp, synthetic construct; identical to SEQ ID NO: 37179
  source 1..80: mol_type = other DNA

SEQ ID NO: 71240 - DNA, 80 bp, synthetic construct; identical to SEQ ID NO: 37180
  source 1..80: mol_type = other DNA

SEQ ID NO: 71241 - DNA, 80 bp, synthetic construct; identical to SEQ ID NO: 37181
  source 1..80: mol_type = other DNA

SEQ ID NO: 71242 - DNA, 80 bp, synthetic construct; identical to SEQ ID NO: 13176
  source 1..80: mol_type = other DNA

SEQ ID NO: 71243 - DNA, 80 bp, synthetic construct; identical to SEQ ID NO: 37183
  source 1..80: mol_type = other DNA

SEQ ID NO: 71244 - DNA, 80 bp, synthetic construct; identical to SEQ ID NO: 37184
  source 1..80: mol_type = other DNA

SEQ ID NO: 71245 - DNA, 80 bp, synthetic construct; identical to SEQ ID NO: 37185
  source 1..80: mol_type = other DNA

SEQ ID NO: 71246 - DNA, 80 bp, synthetic construct; identical to SEQ ID NO: 13177
  source 1..80: mol_type = other DNA

SEQ ID NO: 71247 - DNA, 80 bp, synthetic construct; identical to SEQ ID NO: 37187
  source 1..80: mol_type = other DNA

SEQ ID NO: 71248 - DNA, 80 bp, synthetic construct; identical to SEQ ID NO: 37188
  source 1..80: mol_type = other DNA

SEQ ID NO: 71249 - DNA, 80 bp, synthetic construct; identical to SEQ ID NO: 13178
  source 1..80: mol_type = other DNA

SEQ ID NO: 71250 - DNA, 80 bp, synthetic construct; identical to SEQ ID NO: 37190
  source 1..80: mol_type = other DNA

SEQ ID NO: 71251 - DNA, 80 bp, synthetic construct; identical to SEQ ID NO: 37191
  source 1..80: mol_type = other DNA

SEQ ID NO: 71252 - DNA, 80 bp, synthetic construct; identical to SEQ ID NO: 37192
  source 1..80: mol_type = other DNA

SEQ ID NO: 71253 - DNA, 80 bp, synthetic construct; identical to SEQ ID NO: 13179
  source 1..80: mol_type = other DNA

SEQ ID NO: 71254 - DNA, 80 bp, synthetic construct; identical to SEQ ID NO: 37194
  source 1..80: mol_type = other DNA

SEQ ID NO: 71255 - DNA, 80 bp, synthetic construct; identical to SEQ ID NO: 37195
  source 1..80: mol_type = other DNA

SEQ ID NO: 71256 - DNA, 80 bp, synthetic construct; identical to SEQ ID NO: 37196
  source 1..80: mol_type = other DNA

SEQ ID NO: 71257 - DNA, 80 bp, synthetic construct; identical to SEQ ID NO: 13180
  source 1..80: mol_type = other DNA

SEQ ID NO: 71258 - DNA, 80 bp, synthetic construct; identical to SEQ ID NO: 37198
  source 1..80: mol_type = other DNA

SEQ ID NO: 71259 - DNA, 80 bp, synthetic construct; identical to SEQ ID NO: 37199
  source 1..80: mol_type = other DNA

SEQ ID NO: 71260 - DNA, 80 bp, synthetic construct; identical to SEQ ID NO: 37200
  source 1..80: mol_type = other DNA

SEQ ID NO: 71261 - DNA, 80 bp, synthetic construct; identical to SEQ ID NO: 37201
  source 1..80: mol_type = other DNA

SEQ ID NO: 71262 - DNA, 80 bp, synthetic construct; identical to SEQ ID NO: 13181
  source 1..80: mol_type = other DNA

SEQ ID NO: 71263 - DNA, 80 bp, synthetic construct; identical to SEQ ID NO: 37203
  source 1..80: mol_type = other DNA

SEQ ID NO: 71264 - DNA, 80 bp, synthetic construct; identical to SEQ ID NO: 37204
  source 1..80: mol_type = other DNA

SEQ ID NO: 71265 - DNA, 80 bp, synthetic construct; identical to SEQ ID NO: 13182
  source 1..80: mol_type = other DNA

SEQ ID NO: 71266 - DNA, 80 bp, synthetic construct; identical to SEQ ID NO: 37206
  source 1..80: mol_type = other DNA

SEQ ID NO: 71267 - DNA, 80 bp, synthetic construct; identical to SEQ ID NO: 37207
  source 1..80: mol_type = other DNA

SEQ ID NO: 71268 - DNA, 80 bp, synthetic construct; identical to SEQ ID NO: 37208
  source 1..80: mol_type = other DNA

SEQ ID NO: 71269 - DNA, 80 bp, synthetic construct; identical to SEQ ID NO: 37209
  source 1..80: mol_type = other DNA

SEQ ID NO: 71270 - DNA, 80 bp, synthetic construct; identical to SEQ ID NO: 13183
  source 1..80: mol_type = other DNA

SEQ ID NO: 71271 - DNA, 80 bp, synthetic construct; identical to SEQ ID NO: 37211
  source 1..80: mol_type = other DNA

SEQ ID NO: 71272 - DNA, 80 bp, synthetic construct; identical to SEQ ID NO: 37212
  source 1..80: mol_type = other DNA

SEQ ID NO: 71273 - DNA, 80 bp, synthetic construct; identical to SEQ ID NO: 13184
  source 1..80: mol_type = other DNA

SEQ ID NO: 71274 - DNA, 80 bp, synthetic construct; identical to SEQ ID NO: 37214
  source 1..80: mol_type = other DNA

SEQ ID NO: 71275 - DNA, 80 bp, synthetic construct; identical to SEQ ID NO: 37215
  source 1..80: mol_type = other DNA

SEQ ID NO: 71276 - DNA, 80 bp, synthetic construct; identical to SEQ ID NO: 37216
  source 1..80: mol_type = other DNA

SEQ ID NO: 71277 - DNA, 80 bp, synthetic construct; identical to SEQ ID NO: 37217
  source 1..80: mol_type = other DNA

SEQ ID NO: 71278 - DNA, 80 bp, synthetic construct; identical to SEQ ID NO: 13185
  source 1..80: mol_type = other DNA

SEQ ID NO: 71279 - DNA, 80 bp, synthetic construct; identical to SEQ ID NO: 37219
  source 1..80: mol_type = other DNA

SEQ ID NO: 71280 - DNA, 80 bp, synthetic construct; identical to SEQ ID NO: 37220
  source 1..80: mol_type = other DNA

SEQ ID NO: 71281 - DNA, 80 bp, synthetic construct; identical to SEQ ID NO: 37221
  source 1..80: mol_type = other DNA

SEQ ID NO: 71282 - DNA, 80 bp, synthetic construct; identical to SEQ ID NO: 13186
  source 1..80: mol_type = other DNA

SEQ ID NO: 71283 - DNA, 80 bp, synthetic construct; identical to SEQ ID NO: 37223
  source 1..80: mol_type = other DNA

SEQ ID NO: 71284 - DNA, 80 bp, synthetic construct; identical to SEQ ID NO: 37224
  source 1..80: mol_type = other DNA

SEQ ID NO: 71285 - DNA, 80 bp, synthetic construct; identical to SEQ ID NO: 37225
  source 1..80: mol_type = other DNA

SEQ ID NO: 71286 - DNA, 80 bp, synthetic construct; identical to SEQ ID NO: 13187
  source 1..80: mol_type = other DNA

SEQ ID NO: 71287 - DNA, 80 bp, synthetic construct; identical to SEQ ID NO: 37227
  source 1..80: mol_type = other DNA

SEQ ID NO: 71288 - DNA, 80 bp, synthetic construct; identical to SEQ ID NO: 37228
  source 1..80: mol_type = other DNA

SEQ ID NO: 71289 - DNA, 80 bp, synthetic construct; identical to SEQ ID NO: 13188
  source 1..80: mol_type = other DNA

SEQ ID NO: 71290 - DNA, 80 bp, synthetic construct; identical to SEQ ID NO: 37230
  source 1..80: mol_type = other DNA

SEQ ID NO: 71291 - DNA, 80 bp, synthetic construct; identical to SEQ ID NO: 37231
  source 1..80: mol_type = other DNA

SEQ ID NO: 71292 - DNA, 80 bp, synthetic construct; identical to SEQ ID NO: 37232
  source 1..80: mol_type = other DNA

SEQ ID NO: 71293 - DNA, 80 bp, synthetic construct; identical to SEQ ID NO: 13189
  source 1..80: mol_type = other DNA

SEQ ID NO: 71294 - DNA, 80 bp, synthetic construct; identical to SEQ ID NO: 37234
  source 1..80: mol_type = other DNA

SEQ ID NO: 71295 - DNA, 80 bp, synthetic construct; identical to SEQ ID NO: 37235
  source 1..80: mol_type = other DNA

SEQ ID NO: 71296 - DNA, 80 bp, synthetic construct; identical to SEQ ID NO: 37236
  source 1..80: mol_type = other DNA

SEQ ID NO: 71297 - DNA, 80 bp, synthetic construct; identical to SEQ ID NO: 13190
  source 1..80: mol_type = other DNA

SEQ ID NO: 71298 - DNA, 80 bp, synthetic construct; identical to SEQ ID NO: 37239
  source 1..80: mol_type = other DNA

SEQ ID NO: 71299 - DNA, 80 bp, synthetic construct; identical to SEQ ID NO: 37240
  source 1..80: mol_type = other DNA

SEQ ID NO: 71300 - DNA, 80 bp, synthetic construct; identical to SEQ ID NO: 37241
  source 1..80: mol_type = other DNA

SEQ ID NO: 71301 - DNA, 80 bp, synthetic construct; identical to SEQ ID NO: 13191
  source 1..80: mol_type = other DNA

SEQ ID NO: 71302 - DNA, 80 bp, synthetic construct; identical to SEQ ID NO: 37243
  source 1..80: mol_type = other DNA

SEQ ID NO: 71303 - DNA, 80 bp, synthetic construct; identical to SEQ ID NO: 37244
  source 1..80: mol_type = other DNA

SEQ ID NO: 71304 - DNA, 80 bp, synthetic construct; identical to SEQ ID NO: 13192
  source 1..80: mol_type = other DNA

SEQ ID NO: 71305 - DNA, 80 bp, synthetic construct; identical to SEQ ID NO: 37246
  source 1..80: mol_type = other DNA

SEQ ID NO: 71306 - DNA, 80 bp, synthetic construct; identical to SEQ ID NO: 37247
  source 1..80: mol_type = other DNA

SEQ ID NO: 71307 - DNA, 80 bp, synthetic construct; identical to SEQ ID NO: 37248
  source 1..80: mol_type = other DNA

SEQ ID NO: 71308 - DNA, 80 bp, synthetic construct; identical to SEQ ID NO: 13193
  source 1..80: mol_type = other DNA

SEQ ID NO: 71309 - DNA, 80 bp, synthetic construct; identical to SEQ ID NO: 37250
  source 1..80: mol_type = other DNA

SEQ ID NO: 71310 - DNA, 80 bp, synthetic construct; identical to SEQ ID NO: 37251
  source 1..80: mol_type = other DNA

SEQ ID NO: 71311 - DNA, 80 bp, synthetic construct; identical to SEQ ID NO: 37252
  source 1..80: mol_type = other DNA

SEQ ID NO: 71312 - DNA, 80 bp, synthetic construct; identical to SEQ ID NO: 37253
  source 1..80: mol_type = other DNA

SEQ ID NO: 71313 - DNA, 80 bp, synthetic construct; identical to SEQ ID NO: 13194
  source 1..80: mol_type = other DNA

SEQ ID NO: 71314 - DNA, 80 bp, synthetic construct; identical to SEQ ID NO: 37255
  source 1..80: mol_type = other DNA

SEQ ID NO: 71315 - DNA, 80 bp, synthetic construct; identical to SEQ ID NO: 37256
  source 1..80: mol_type = other DNA

SEQ ID NO: 71316 - DNA, 80 bp, synthetic construct; identical to SEQ ID NO: 13195
  source 1..80: mol_type = other DNA

SEQ ID NO: 71317 - DNA, 80 bp, synthetic construct; identical to SEQ ID NO: 37258
  source 1..80: mol_type = other DNA

SEQ ID NO: 71318 - DNA, 80 bp, synthetic construct; identical to SEQ ID NO: 37259
  source 1..80: mol_type = other DNA

SEQ ID NO: 71319 - DNA, 80 bp, synthetic construct; identical to SEQ ID NO: 13196
  source 1..80: mol_type = other DNA

SEQ ID NO: 71320 - DNA, 80 bp, synthetic construct; identical to SEQ ID NO: 37261
  source 1..80: mol_type = other DNA

SEQ ID NO: 71321 - DNA, 80 bp, synthetic construct; identical to SEQ ID NO: 37262
  source 1..80: mol_type = other DNA

SEQ ID NO: 71322 - DNA, 80 bp, synthetic construct; identical to SEQ ID NO: 37263
  source 1..80: mol_type = other DNA

SEQ ID NO: 71323 - DNA, 80 bp, synthetic construct; identical to SEQ ID NO: 37264
  source 1..80: mol_type = other DNA

SEQ ID NO: 71324 - DNA, 80 bp, synthetic construct; identical to SEQ ID NO: 13197
  source 1..80: mol_type = other DNA

SEQ ID NO: 71325 - DNA, 80 bp, synthetic construct; identical to SEQ ID NO: 37266
  source 1..80: mol_type = other DNA

SEQ ID NO: 71326 - DNA, 80 bp, synthetic construct; identical to SEQ ID NO: 37267
  source 1..80: mol_type = other DNA

SEQ ID NO: 71327 - DNA, 80 bp, synthetic construct; identical to SEQ ID NO: 13198
  source 1..80: mol_type = other DNA

SEQ ID NO: 71328 - DNA, 80 bp, synthetic construct; identical to SEQ ID NO: 37269
  source 1..80: mol_type = other DNA

SEQ ID NO: 71329 - DNA, 80 bp, synthetic construct; identical to SEQ ID NO: 37270
  source 1..80: mol_type = other DNA

SEQ ID NO: 71330 - DNA, 80 bp, synthetic construct; identical to SEQ ID NO: 37271
  source 1..80: mol_type = other DNA

SEQ ID NO: 71331 - DNA, 80 bp, synthetic construct; identical to SEQ ID NO: 37272
  source 1..80: mol_type = other DNA

SEQ ID NO: 71332 - DNA, 80 bp, synthetic construct; identical to SEQ ID NO: 13199
  source 1..80: mol_type = other DNA

SEQ ID NO: 71333 - DNA, 80 bp, synthetic construct; identical to SEQ ID NO: 37274
  source 1..80: mol_type = other DNA

SEQ ID NO: 71334 - DNA, 80 bp, synthetic construct; identical to SEQ ID NO: 37275
  source 1..80: mol_type = other DNA

SEQ ID NO: 71335 - DNA, 80 bp, synthetic construct; identical to SEQ ID NO: 13200
  source 1..80: mol_type = other DNA

SEQ ID NO: 71336 - DNA, 80 bp, synthetic construct; identical to SEQ ID NO: 37277
  source 1..80: mol_type = other DNA

SEQ ID NO: 71337 - DNA, 80 bp, synthetic construct; identical to SEQ ID NO: 37278
  source 1..80: mol_type = other DNA

SEQ ID NO: 71338 - DNA, 80 bp, synthetic construct; identical to SEQ ID NO: 37279
  source 1..80: mol_type = other DNA

SEQ ID NO: 71339 - DNA, 80 bp, synthetic construct; identical to SEQ ID NO: 37280
  source 1..80: mol_type = other DNA

SEQ ID NO: 71340 - DNA, 80 bp, synthetic construct; identical to SEQ ID NO: 13201
  source 1..80: mol_type = other DNA

SEQ ID NO: 71341 - DNA, 80 bp, synthetic construct; identical to SEQ ID NO: 37282
  source 1..80: mol_type = other DNA

SEQ ID NO: 71342 - DNA, 80 bp, synthetic construct; identical to SEQ ID NO: 37283
  source 1..80: mol_type = other DNA

SEQ ID NO: 71343 - DNA, 80 bp, synthetic construct; identical to SEQ ID NO: 37284
  source 1..80: mol_type = other DNA

SEQ ID NO: 71344 - DNA, 80 bp, synthetic construct; identical to SEQ ID NO: 13202
  source 1..80: mol_type = other DNA

SEQ ID NO: 71345 - DNA, 80 bp, synthetic construct; identical to SEQ ID NO: 37286
  source 1..80: mol_type = other DNA

SEQ ID NO: 71346 - DNA, 80 bp, synthetic construct; identical to SEQ ID NO: 37287
  source 1..80: mol_type = other DNA

SEQ ID NO: 71347 - DNA, 80 bp, synthetic construct; identical to SEQ ID NO: 13203
  source 1..80: mol_type = other DNA

SEQ ID NO: 71348 - DNA, 80 bp, synthetic construct; identical to SEQ ID NO: 37289
  source 1..80: mol_type = other DNA

SEQ ID NO: 71349 - DNA, 80 bp, synthetic construct; identical to SEQ ID NO: 37290
  source 1..80: mol_type = other DNA

SEQ ID NO: 71350 - DNA, 80 bp, synthetic construct; identical to SEQ ID NO: 37291
  source 1..80: mol_type = other DNA

SEQ ID NO: 71351 - DNA, 80 bp, synthetic construct; identical to SEQ ID NO: 13204
  source 1..80: mol_type = other DNA

SEQ ID NO: 71352 - DNA, 80 bp, synthetic construct; identical to SEQ ID NO: 37293
  source 1..80: mol_type = other DNA

SEQ ID NO: 71353 - DNA, 80 bp, synthetic construct; identical to SEQ ID NO: 37294
  source 1..80: mol_type = other DNA

SEQ ID NO: 71354 - DNA, 80 bp, synthetic construct; identical to SEQ ID NO: 37295
  source 1..80: mol_type = other DNA

SEQ ID NO: 71355 - DNA, 80 bp, synthetic construct; identical to SEQ ID NO: 13205
  source 1..80: mol_type = other DNA

SEQ ID NO: 71356 - DNA, 80 bp, synthetic construct; identical to SEQ ID NO: 37297
  source 1..80: mol_type = other DNA

SEQ ID NO: 71357 - DNA, 80 bp, synthetic construct; identical to SEQ ID NO: 37298
  source 1..80: mol_type = other DNA

SEQ ID NO: 71358 - DNA, 80 bp, synthetic construct; identical to SEQ ID NO: 37299
  source 1..80: mol_type = other DNA

SEQ ID NO: 71359 - DNA, 80 bp, synthetic construct; identical to SEQ ID NO: 37300
  source 1..80: mol_type = other DNA

SEQ ID NO: 71360 - DNA, 80 bp, synthetic construct; identical to SEQ ID NO: 13206
  source 1..80: mol_type = other DNA

SEQ ID NO: 71361 - DNA, 80 bp, synthetic construct; identical to SEQ ID NO: 37302
  source 1..80: mol_type = other DNA

SEQ ID NO: 71362 - DNA, 80 bp, synthetic construct; identical to SEQ ID NO: 37303
  source 1..80: mol_type = other DNA

SEQ ID NO: 71363 - DNA, 80 bp, synthetic construct; identical to SEQ ID NO: 13207
  source 1..80: mol_type = other DNA

SEQ ID NO: 71364 - DNA, 80 bp, synthetic construct; identical to SEQ ID NO: 37305
  source 1..80: mol_type = other DNA

SEQ ID NO: 71365 - DNA, 80 bp, synthetic construct; identical to SEQ ID NO: 37306
  source 1..80: mol_type = other DNA

SEQ ID NO: 71366 - DNA, 80 bp, synthetic construct; identical to SEQ ID NO: 37307
  source 1..80: mol_type = other DNA

SEQ ID NO: 71367 - DNA, 80 bp, synthetic construct; identical to SEQ ID NO: 13208
  source 1..80: mol_type = other DNA

SEQ ID NO: 71368 - DNA, 80 bp, synthetic construct; identical to SEQ ID NO: 37309
  source 1..80: mol_type = other DNA

SEQ ID NO: 71369 - DNA, 80 bp, synthetic construct; identical to SEQ ID NO: 37310
  source 1..80: mol_type = other DNA

SEQ ID NO: 71370 - DNA, 80 bp, synthetic construct; identical to SEQ ID NO: 37311
  source 1..80: mol_type = other DNA

SEQ ID NO: 71371 - DNA, 80 bp, synthetic construct; identical to SEQ ID NO: 13209
  source 1..80: mol_type = other DNA

SEQ ID NO: 71372 - DNA, 80 bp, synthetic construct; identical to SEQ ID NO: 37313
  source 1..80: mol_type = other DNA

SEQ ID NO: 71373 - DNA, 80 bp, synthetic construct; identical to SEQ ID NO: 37314
  source 1..80: mol_type = other DNA

SEQ ID NO: 71374 - DNA, 80 bp, synthetic construct; identical to SEQ ID NO: 37315
  source 1..80: mol_type = other DNA

SEQ ID NO: 71375 - DNA, 80 bp, synthetic construct; identical to SEQ ID NO: 13210
  source 1..80: mol_type = other DNA

SEQ ID NO: 71376 - DNA, 80 bp, synthetic construct; identical to SEQ ID NO: 37317
  source 1..80: mol_type = other DNA

SEQ ID NO: 71377 - DNA, 80 bp, synthetic construct; identical to SEQ ID NO: 37318
  source 1..80: mol_type = other DNA

SEQ ID NO: 71378 - DNA, 80 bp, synthetic construct; identical to SEQ ID NO: 37319
  source 1..80: mol_type = other DNA

SEQ ID NO: 71379 - DNA, 80 bp, synthetic construct; identical to SEQ ID NO: 13211
  source 1..80: mol_type = other DNA

SEQ ID NO: 71380 - DNA, 80 bp, synthetic construct; identical to SEQ ID NO: 37321
  source 1..80: mol_type = other DNA

SEQ ID NO: 71381 - DNA, 80 bp, synthetic construct; identical to SEQ ID NO: 37322
  source 1..80: mol_type = other DNA

SEQ ID NO: 71382 - DNA, 80 bp, synthetic construct; identical to SEQ ID NO: 37323
  source 1..80: mol_type = other DNA

SEQ ID NO: 71383 - DNA, 80 bp, synthetic construct; identical to SEQ ID NO: 13212
  source 1..80: mol_type = other DNA

SEQ ID NO: 71384 - DNA, 80 bp, synthetic construct; identical to SEQ ID NO: 37325
  source 1..80: mol_type = other DNA

SEQ ID NO: 71385 - DNA, 80 bp, synthetic construct; identical to SEQ ID NO: 37326
  source 1..80: mol_type = other DNA

SEQ ID NO: 71386 - DNA, 80 bp, synthetic construct; identical to SEQ ID NO: 37327
  source 1..80: mol_type = other DNA

SEQ ID NO: 71387 - DNA, 80 bp, synthetic construct; identical to SEQ ID NO: 37328
  source 1..80: mol_type = other DNA

SEQ ID NO: 71388 - DNA, 80 bp, synthetic construct; identical to SEQ ID NO: 13213
  source 1..80: mol_type = other DNA

SEQ ID NO: 71389 - DNA, 80 bp, synthetic construct; identical to SEQ ID NO: 37330
  source 1..80: mol_type = other DNA

SEQ ID NO: 71390 - DNA, 80 bp, synthetic construct; identical to SEQ ID NO: 37331
  source 1..80: mol_type = other DNA

SEQ ID NO: 71391 - DNA, 80 bp, synthetic construct; identical to SEQ ID NO: 13214
  source 1..80: mol_type = other DNA

SEQ ID NO: 71392 - DNA, 80 bp, synthetic construct; identical to SEQ ID NO: 37333
  source 1..80: mol_type = other DNA

SEQ ID NO: 71393 - DNA, 80 bp, synthetic construct; identical to SEQ ID NO: 37334
  source 1..80: mol_type = other DNA

SEQ ID NO: 71394 - DNA, 80 bp, synthetic construct; identical to SEQ ID NO: 37335
  source 1..80: mol_type = other DNA

SEQ ID NO: 71395 - DNA, 80 bp, synthetic construct; identical to SEQ ID NO: 37336
  source 1..80: mol_type = other DNA

SEQ ID NO: 71396 - DNA, 80 bp, synthetic construct; identical to SEQ ID NO: 13215
  source 1..80: mol_type = other DNA

SEQ ID NO: 71397 - DNA, 80 bp, synthetic construct; identical to SEQ ID NO: 37338
  source 1..80: mol_type = other DNA

SEQ ID NO: 71398 - DNA, 80 bp, synthetic construct; identical to SEQ ID NO: 37339
  source 1..80: mol_type = other DNA

SEQ ID NO: 71399 - DNA, 80 bp, synthetic construct; identical to SEQ ID NO: 13216
  source 1..80: mol_type = other DNA

SEQ ID NO: 71400 - DNA, 80 bp, synthetic construct; identical to SEQ ID NO: 37341
  source 1..80: mol_type = other DNA

SEQ ID NO: 71401 - DNA, 80 bp, synthetic construct; identical to SEQ ID NO: 37342
  source 1..80: mol_type = other DNA

SEQ ID NO: 71402 - DNA, 80 bp, synthetic construct; identical to SEQ ID NO: 37343
  source 1..80: mol_type = other DNA

SEQ ID NO: 71403 - DNA, 80 bp, synthetic construct; identical to SEQ ID NO: 37344
  source 1..80: mol_type = other DNA

SEQ ID NO: 71404 - DNA, 80 bp, synthetic construct; identical to SEQ ID NO: 13217
  source 1..80: mol_type = other DNA

SEQ ID NO: 71405 - DNA, 80 bp, synthetic construct; identical to SEQ ID NO: 37346
  source 1..80: mol_type = other DNA

SEQ ID NO: 71406 - DNA, 80 bp, synthetic construct; identical to SEQ ID NO: 37347
  source 1..80: mol_type = other DNA

SEQ ID NO: 71407 - DNA, 80 bp, synthetic construct; identical to SEQ ID NO: 37348
  source 1..80: mol_type = other DNA

SEQ ID NO: 71408 - DNA, 80 bp, synthetic construct; identical to SEQ ID NO: 13218
  source 1..80: mol_type = other DNA

SEQ ID NO: 71409 - DNA, 80 bp, synthetic construct; identical to SEQ ID NO: 37350
  source 1..80: mol_type = other DNA

SEQ ID NO: 71410 - DNA, 80 bp, synthetic construct; identical to SEQ ID NO: 37351
  source 1..80: mol_type = other DNA

SEQ ID NO: 71411 - DNA, 80 bp, synthetic construct; identical to SEQ ID NO: 37352
  source 1..80: mol_type = other DNA

SEQ ID NO: 71412 - DNA, 80 bp, synthetic construct; identical to SEQ ID NO: 37353
  source 1..80: mol_type = other DNA

SEQ ID NO: 71413 - DNA, 80 bp, synthetic construct; identical to SEQ ID NO: 13219
  source 1..80: mol_type = other DNA

SEQ ID NO: 71414 - DNA, 80 bp, synthetic construct; identical to SEQ ID NO: 37355
  source 1..80: mol_type = other DNA

SEQ ID NO: 71415 - DNA, 80 bp, synthetic construct; identical to SEQ ID NO: 37356
  source 1..80: mol_type = other DNA

SEQ ID NO: 71416 - DNA, 80 bp, synthetic construct; identical to SEQ ID NO: 13220
  source 1..80: mol_type = other DNA

SEQ ID NO: 71417 - DNA, 80 bp, synthetic construct; identical to SEQ ID NO: 37358
  source 1..80: mol_type = other DNA

SEQ ID NO: 71418 - DNA, 80 bp, synthetic construct; identical to SEQ ID NO: 37359
  source 1..80: mol_type = other DNA

SEQ ID NO: 71419 - DNA, 80 bp, synthetic construct; identical to SEQ ID NO: 37360
  source 1..80: mol_type = other DNA

SEQ ID NO: 71420 - DNA, 80 bp, synthetic construct; identical to SEQ ID NO: 37361
  source 1..80: mol_type = other DNA

SEQ ID NO: 71421 - DNA, 80 bp, synthetic construct; identical to SEQ ID NO: 13221
  source 1..80: mol_type = other DNA

SEQ ID NO: 71422 - DNA, 80 bp, synthetic construct; identical to SEQ ID NO: 37363
  source 1..80: mol_type = other DNA

SEQ ID NO: 71423 - DNA, 80 bp, synthetic construct; identical to SEQ ID NO: 37364
  source 1..80: mol_type = other DNA

SEQ ID NO: 71424 - DNA, 80 bp, synthetic construct; identical to SEQ ID NO: 37365
  source 1..80: mol_type = other DNA

SEQ ID NO: 71425 - DNA, 80 bp, synthetic construct; identical to SEQ ID NO: 13222
  source 1..80: mol_type = other DNA

SEQ ID NO: 71426 - DNA, 80 bp, synthetic construct; identical to SEQ ID NO: 37367
  source 1..80: mol_type = other DNA

SEQ ID NO: 71427 - DNA, 80 bp, synthetic construct; identical to SEQ ID NO: 37368
  source 1..80: mol_type = other DNA

SEQ ID NO: 71428 - DNA, 80 bp, synthetic construct; identical to SEQ ID NO: 13223
  source 1..80: mol_type = other DNA

SEQ ID NO: 71429 - DNA, 80 bp, synthetic construct; identical to SEQ ID NO: 37370
  source 1..80: mol_type = other DNA

SEQ ID NO: 71430 - DNA, 80 bp, synthetic construct; identical to SEQ ID NO: 37371
  source 1..80: mol_type = other DNA

SEQ ID NO: 71431 - DNA, 80 bp, synthetic construct; identical to SEQ ID NO: 37372
  source 1..80: mol_type = other DNA

SEQ ID NO: 71432 - DNA, 80 bp, synthetic construct; identical to SEQ ID NO: 13224
  source 1..80: mol_type = other DNA

SEQ ID NO: 71433 - DNA, 80 bp, synthetic construct; identical to SEQ ID NO: 37374
  source 1..80: mol_type = other DNA

SEQ ID NO: 71434 - DNA, 80 bp, synthetic construct; identical to SEQ ID NO: 37375
  source 1..80: mol_type = other DNA

SEQ ID NO: 71435 - DNA, 80 bp, synthetic construct; identical to SEQ ID NO: 37376
  source 1..80: mol_type = other DNA

SEQ ID NO: 71436 - DNA, 80 bp, synthetic construct; identical to SEQ ID NO: 13225
  source 1..80: mol_type = other DNA

SEQ ID NO: 71437 - DNA, 80 bp, synthetic construct; identical to SEQ ID NO: 37378
  source 1..80: mol_type = other DNA

SEQ ID NO: 71438 - DNA, 80 bp, synthetic construct; identical to SEQ ID NO: 37379
  source 1..80: mol_type = other DNA

SEQ ID NO: 71439 - DNA, 80 bp, synthetic construct; identical to SEQ ID NO: 37380
  source 1..80: mol_type = other DNA

SEQ ID NO: 71440 - DNA, 80 bp, synthetic construct; identical to SEQ ID NO: 13226
  source 1..80: mol_type = other DNA

SEQ ID NO: 71441 - DNA, 80 bp, synthetic construct; identical to SEQ ID NO: 37382
  source 1..80: mol_type = other DNA

SEQ ID NO: 71442 - DNA, 80 bp, synthetic construct; identical to SEQ ID NO: 37383
  source 1..80: mol_type = other DNA

SEQ ID NO: 71443 - DNA, 80 bp, synthetic construct; identical to SEQ ID NO: 37384
  source 1..80: mol_type = other DNA

SEQ ID NO: 71444 - DNA, 80 bp, synthetic construct; identical to SEQ ID NO: 13227
  source 1..80: mol_type = other DNA

SEQ ID NO: 71445 - DNA, 80 bp, synthetic construct; identical to SEQ ID NO: 37386
  source 1..80: mol_type = other DNA

SEQ ID NO: 71446 - DNA, 80 bp, synthetic construct; identical to SEQ ID NO: 37387
  source 1..80: mol_type = other DNA

SEQ ID NO: 71447 - DNA, 80 bp, synthetic construct; identical to SEQ ID NO: 13228
  source 1..80: mol_type = other DNA

SEQ ID NO: 71448 - DNA, 80 bp, synthetic construct; identical to SEQ ID NO: 37389
  source 1..80: mol_type = other DNA

SEQ ID NO: 71449 - DNA, 80 bp, synthetic construct; identical to SEQ ID NO: 37390
  source 1..80: mol_type = other DNA

SEQ ID NO: 71450 - DNA, 80 bp, synthetic construct; identical to SEQ ID NO: 37391
  source 1..80: mol_type = other DNA

SEQ ID NO: 71451 - DNA, 80 bp, synthetic construct; identical to SEQ ID NO: 13229
  source 1..80: mol_type = other DNA

SEQ ID NO: 71452 - DNA, 80 bp, synthetic construct; identical to SEQ ID NO: 37393
  source 1..80: mol_type = other DNA

SEQ ID NO: 71453 - DNA, 80 bp, synthetic construct; identical to SEQ ID NO: 37394
  source 1..80: mol_type = other DNA

SEQ ID NO: 71454 - DNA, 80 bp, synthetic construct; identical to SEQ ID NO: 37395
  source 1..80: mol_type = other DNA

SEQ ID NO: 71455 - DNA, 80 bp, synthetic construct; identical to SEQ ID NO: 37396
  source 1..80: mol_type = other DNA

SEQ ID NO: 71456 - DNA, 80 bp, synthetic construct; identical to SEQ ID NO: 13230
  source 1..80: mol_type = other DNA

SEQ ID NO: 71457 - DNA, 80 bp, synthetic construct; identical to SEQ ID NO: 37399
  source 1..80: mol_type = other DNA

SEQ ID NO: 71458 - DNA, 80 bp, synthetic construct; identical to SEQ ID NO: 37400
  source 1..80: mol_type = other DNA

SEQ ID NO: 71459 - DNA, 80 bp, synthetic construct; identical to SEQ ID NO: 13231
  source 1..80: mol_type = other DNA

SEQ ID NO: 71460 - DNA, 80 bp, synthetic construct; identical to SEQ ID NO: 37402
  source 1..80: mol_type = other DNA

SEQ ID NO: 71461 - DNA, 80 bp, synthetic construct; identical to SEQ ID NO: 37403
  source 1..80: mol_type = other DNA

SEQ ID NO: 71462 - DNA, 80 bp, synthetic construct; identical to SEQ ID NO: 37404
  source 1..80: mol_type = other DNA

SEQ ID NO: 71463 - DNA, 80 bp, synthetic construct; identical to SEQ ID NO: 13232
  source 1..80: mol_type = other DNA

SEQ ID NO: 71464 - DNA, 80 bp, synthetic construct; identical to SEQ ID NO: 37406
  source 1..80: mol_type = other DNA

SEQ ID NO: 71465 - DNA, 80 bp, synthetic construct; identical to SEQ ID NO: 37407
  source 1..80: mol_type = other DNA

SEQ ID NO: 71466 - DNA, 80 bp, synthetic construct; identical to SEQ ID NO: 13233
  source 1..80: mol_type = other DNA

SEQ ID NO: 71467 - DNA, 80 bp, synthetic construct; identical to SEQ ID NO: 37409
  source 1..80: mol_type = other DNA

SEQ ID NO: 71468 - DNA, 80 bp, synthetic construct; identical to SEQ ID NO: 37410
  source 1..80: mol_type = other DNA

SEQ ID NO: 71469 - DNA, 80 bp, synthetic construct; identical to SEQ ID NO: 37411
  source 1..80: mol_type = other DNA

SEQ ID NO: 71470 - DNA, 80 bp, synthetic construct; identical to SEQ ID NO: 13234
  source 1..80: mol_type = other DNA

SEQ ID NO: 71471 - DNA, 80 bp, synthetic construct; identical to SEQ ID NO: 37414
  source 1..80: mol_type = other DNA

SEQ ID NO: 71472 - DNA, 80 bp, synthetic construct; identical to SEQ ID NO: 37415
  source 1..80: mol_type = other DNA

SEQ ID NO: 71473 - DNA, 80 bp, synthetic construct; identical to SEQ ID NO: 37416
  source 1..80: mol_type = other DNA

SEQ ID NO: 71474 - DNA, 80 bp, synthetic construct; identical to SEQ ID NO: 13235
  source 1..80: mol_type = other DNA

SEQ ID NO: 71475 - DNA, 80 bp, synthetic construct; identical to SEQ ID NO: 37418
  source 1..80: mol_type = other DNA

SEQ ID NO: 71476 - DNA, 80 bp, synthetic construct; identical to SEQ ID NO: 37419
  source 1..80: mol_type = other DNA

SEQ ID NO: 71477 - DNA, 80 bp, synthetic construct; identical to SEQ ID NO: 13236
  source 1..80: mol_type = other DNA

SEQ ID NO: 71478 - DNA, 80 bp, synthetic construct; identical to SEQ ID NO: 37421
  source 1..80: mol_type = other DNA

SEQ ID NO: 71479 - DNA, 80 bp, synthetic construct; identical to SEQ ID NO: 37422
  source 1..80: mol_type = other DNA

SEQ ID NO: 71480 - DNA, 80 bp, synthetic construct; identical to SEQ ID NO: 37423
  source 1..80: mol_type = other DNA

SEQ ID NO: 71481 - DNA, 80 bp, synthetic construct; identical to SEQ ID NO: 13237
  source 1..80: mol_type = other DNA

SEQ ID NO: 71482 - DNA, 80 bp, synthetic construct; identical to SEQ ID NO: 37425
  source 1..80: mol_type = other DNA

SEQ ID NO: 71483 - DNA, 80 bp, synthetic construct; identical to SEQ ID NO: 37426
  source 1..80: mol_type = other DNA

SEQ ID NO: 71484 - DNA, 80 bp, synthetic construct; identical to SEQ ID NO: 13238
  source 1..80: mol_type = other DNA

SEQ ID NO: 71485 - DNA, 80 bp, synthetic construct; identical to SEQ ID NO: 37428
  source 1..80: mol_type = other DNA

SEQ ID NO: 71486 - DNA, 80 bp, synthetic construct; identical to SEQ ID NO: 37429
  source 1..80: mol_type = other DNA

SEQ ID NO: 71487 - DNA, 80 bp, synthetic construct; identical to SEQ ID NO: 37430
  source 1..80: mol_type = other DNA

SEQ ID NO: 71488 - DNA, 80 bp, synthetic construct; identical to SEQ ID NO: 13239
  source 1..80: mol_type = other DNA

SEQ ID NO: 71489 - DNA, 80 bp, synthetic construct; identical to SEQ ID NO: 37432
  source 1..80: mol_type = other DNA

SEQ ID NO: 71490 - DNA, 80 bp, synthetic construct; identical to SEQ ID NO: 37433
  source 1..80: mol_type = other DNA

SEQ ID NO: 71491 - DNA, 80 bp, synthetic construct; identical to SEQ ID NO: 37434
  source 1..80: mol_type = other DNA

SEQ ID NO: 71492 - DNA, 80 bp, synthetic construct; identical to SEQ ID NO: 37435
  source 1..80: mol_type = other DNA

SEQ ID NO: 71493 - DNA, 80 bp, synthetic construct; identical to SEQ ID NO: 13240
  source 1..80: mol_type = other DNA

SEQ ID NO: 71494 - DNA, 80 bp, synthetic construct; identical to SEQ ID NO: 37437
  source 1..80: mol_type = other DNA

SEQ ID NO: 71495 - DNA, 80 bp, synthetic construct; identical to SEQ ID NO: 13241
  source 1..80: mol_type = other DNA

SEQ ID NO: 71496 - DNA, 80 bp, synthetic construct; identical to SEQ ID NO: 37439
  source 1..80: mol_type = other DNA

SEQ ID NO: 71497 - DNA, 80 bp, synthetic construct; identical to SEQ ID NO: 37440
  source 1..80: mol_type = other DNA

SEQ ID NO: 71498 - DNA, 80 bp, synthetic construct; identical to SEQ ID NO: 37441
  source 1..80: mol_type = other DNA

SEQ ID NO: 71499 - DNA, 80 bp, synthetic construct; identical to SEQ ID NO: 37442
  source 1..80: mol_type = other DNA

SEQ ID NO: 71500 - DNA, 80 bp, synthetic construct; identical to SEQ ID NO: 13242
  source 1..80: mol_type = other DNA

SEQ ID NO: 71501 - DNA, 80 bp, synthetic construct; identical to SEQ ID NO: 37444
  source 1..80: mol_type = other DNA

SEQ ID NO: 71502 - DNA, 80 bp, synthetic construct; identical to SEQ ID NO: 37445
  source 1..80: mol_type = other DNA

SEQ ID NO: 71503 - DNA, 80 bp, synthetic construct; identical to SEQ ID NO: 13243
  source 1..80: mol_type = other DNA

SEQ ID NO: 71504 - DNA, 80 bp, synthetic construct; identical to SEQ ID NO: 37448
  source 1..80: mol_type = other DNA

SEQ ID NO: 71505 - DNA, 80 bp, synthetic construct; identical to SEQ ID NO: 37449
  source 1..80: mol_type = other DNA

SEQ ID NO: 71506 - DNA, 80 bp, synthetic construct; identical to SEQ ID NO: 37450
  source 1..80: mol_type = other DNA

SEQ ID NO: 71507 - DNA, 80 bp, synthetic construct; identical to SEQ ID NO: 13244
  source 1..80: mol_type = other DNA

SEQ ID NO: 71508 - DNA, 80 bp, synthetic construct; identical to SEQ ID NO: 37452
  source 1..80: mol_type = other DNA

SEQ ID NO: 71509 - DNA, 80 bp, synthetic construct; identical to SEQ ID NO: 37453
  source 1..80: mol_type = other DNA

SEQ ID NO: 71510 - DNA, 80 bp, synthetic construct; identical to SEQ ID NO: 13245
  source 1..80: mol_type = other DNA

SEQ ID NO: 71511 - DNA, 80 bp, synthetic construct; identical to SEQ ID NO: 37455
  source 1..80: mol_type = other DNA

SEQ ID NO: 71512 - DNA, 80 bp, synthetic construct; identical to SEQ ID NO: 37456
  source 1..80: mol_type = other DNA

SEQ ID NO: 71513 - DNA, 80 bp, synthetic construct; identical to SEQ ID NO: 37457
  source 1..80: mol_type = other DNA

SEQ ID NO: 71514 - DNA, 80 bp, synthetic construct; identical to SEQ ID NO: 13246
  source 1..80: mol_type = other DNA

SEQ ID NO: 71515 - DNA, 80 bp, synthetic construct; identical to SEQ ID NO: 37459
  source 1..80: mol_type = other DNA

SEQ ID NO: 71516 - DNA, 80 bp, synthetic construct; identical to SEQ ID NO: 37460
  source 1..80: mol_type = other DNA

SEQ ID NO: 71517 - DNA, 80 bp, synthetic construct; identical to SEQ ID NO: 37461
  source 1..80: mol_type = other DNA

SEQ ID NO: 71518 - DNA, 80 bp, synthetic construct; identical to SEQ ID NO: 13247
  source 1..80: mol_type = other DNA

SEQ ID NO: 71519 - DNA, 80 bp, synthetic construct; identical to SEQ ID NO: 37463
  source 1..80: mol_type = other DNA

SEQ ID NO: 71520 - DNA, 80 bp, synthetic construct; identical to SEQ ID NO: 37464
  source 1..80: mol_type = other DNA

SEQ ID NO: 71521 - DNA, 80 bp, synthetic construct; identical to SEQ ID NO: 37465
  source 1..80: mol_type = other DNA

SEQ ID NO: 71522 - DNA, 80 bp, synthetic construct; identical to SEQ ID NO: 13248
  source 1..80: mol_type = other DNA

SEQ ID NO: 71523 - DNA, 80 bp, synthetic construct; identical to SEQ ID NO: 37467
  source 1..80: mol_type = other DNA

SEQ ID NO: 71524 - DNA, 80 bp, synthetic construct; identical to SEQ ID NO: 37468
  source 1..80: mol_type = other DNA

SEQ ID NO: 71525 - DNA, 80 bp, synthetic construct; identical to SEQ ID NO: 37469
  source 1..80: mol_type = other DNA

SEQ ID NO: 71526 - DNA, 80 bp, synthetic construct; identical to SEQ ID NO: 13249
  source 1..80: mol_type = other DNA

SEQ ID NO: 71527 - DNA, 80 bp, synthetic construct; identical to SEQ ID NO: 37471
  source 1..80: mol_type = other DNA

SEQ ID NO: 71528 - DNA, 80 bp, synthetic construct; identical to SEQ ID NO: 37472
  source 1..80: mol_type = other DNA

SEQ ID NO: 71529 - DNA, 80 bp, synthetic construct; identical to SEQ ID NO: 37474
  source 1..80: mol_type = other DNA

SEQ ID NO: 71530 - DNA, 80 bp, synthetic construct; identical to SEQ ID NO: 13250
  source 1..80: mol_type = other DNA

SEQ ID NO: 71531 - DNA, 80 bp, synthetic construct; identical to SEQ ID NO: 37476
  source 1..80: mol_type = other DNA

SEQ ID NO: 71532 - DNA, 80 bp, synthetic construct; identical to SEQ ID NO: 37477
  source 1..80: mol_type = other DNA

SEQ ID NO: 71533 - DNA, 80 bp, synthetic construct; identical to SEQ ID NO: 13251
  source 1..80: mol_type = other DNA

SEQ ID NO: 71534 - DNA, 80 bp, synthetic construct; identical to SEQ ID NO: 37479
  source 1..80: mol_type = other DNA

SEQ ID NO: 71535 - DNA, 80 bp, synthetic construct; identical to SEQ ID NO: 37480
  source 1..80: mol_type = other DNA

SEQ ID NO: 71536 - DNA, 80 bp, synthetic construct; identical to SEQ ID NO: 37481
  source 1..80: mol_type = other DNA

SEQ ID NO: 71537 - DNA, 80 bp, synthetic construct; identical to SEQ ID NO: 13252
  source 1..80: mol_type = other DNA

SEQ ID NO: 71538 - DNA, 80 bp, synthetic construct; identical to SEQ ID NO: 37483
  source 1..80: mol_type = other DNA

SEQ ID NO: 71539 - DNA, 80 bp, synthetic construct; identical to SEQ ID NO: 37484
  source 1..80: mol_type = other DNA

SEQ ID NO: 71540 - DNA, 80 bp, synthetic construct; identical to SEQ ID NO: 37485
  source 1..80: mol_type = other DNA

SEQ ID NO: 71541 - DNA, 80 bp, synthetic construct; identical to SEQ ID NO: 13253
  source 1..80: mol_type = other DNA

SEQ ID NO: 71542 - DNA, 80 bp, synthetic construct; identical to SEQ ID NO: 37487
  source 1..80: mol_type = other DNA

SEQ ID NO: 71543 - DNA, 80 bp, synthetic construct; identical to SEQ ID NO: 37488
  source 1..80: mol_type = other DNA

SEQ ID NO: 71544 - DNA, 80 bp, synthetic construct; identical to SEQ ID NO: 37489
  source 1..80: mol_type = other DNA

SEQ ID NO: 71545 - DNA, 80 bp, synthetic construct; identical to SEQ ID NO: 37490
  source 1..80: mol_type = other DNA

SEQ ID NO: 71546 - DNA, 80 bp, synthetic construct; identical to SEQ ID NO: 13254
  source 1..80: mol_type = other DNA

SEQ ID NO: 71547 - DNA, 80 bp, synthetic construct; identical to SEQ ID NO: 37492
  source 1..80: mol_type = other DNA

SEQ ID NO: 71548 - DNA, 80 bp, synthetic construct; identical to SEQ ID NO: 37493
  source 1..80: mol_type = other DNA

SEQ ID NO: 71549 - DNA, 80 bp, synthetic construct; identical to SEQ ID NO: 37494
  source 1..80: mol_type = other DNA

SEQ ID NO: 71550 - DNA, 80 bp, synthetic construct; identical to SEQ ID NO: 13255
  source 1..80: mol_type = other DNA

SEQ ID NO: 71551 - DNA, 80 bp, synthetic construct; identical to SEQ ID NO: 37496
  source 1..80: mol_type = other DNA

SEQ ID NO: 71552 - DNA, 80 bp, synthetic construct; identical to SEQ ID NO: 37497
  source 1..80: mol_type = other DNA

SEQ ID NO: 71553 - DNA, 80 bp, synthetic construct; identical to SEQ ID NO: 13256
  source 1..80: mol_type = other DNA

SEQ ID NO: 71554 - DNA, 80 bp, synthetic construct; identical to SEQ ID NO: 37499
  source 1..80: mol_type = other DNA

SEQ ID NO: 71555 - DNA, 80 bp, synthetic construct; identical to SEQ ID NO: 37500
  source 1..80: mol_type = other DNA

SEQ ID NO: 71556 - DNA, 80 bp, synthetic construct; identical to SEQ ID NO: 37501
  source 1..80: mol_type = other DNA

SEQ ID NO: 71557 - DNA, 80 bp, synthetic construct; identical to SEQ ID NO: 37502
  source 1..80: mol_type = other DNA

SEQ ID NO: 71558 - DNA, 80 bp, synthetic construct; identical to SEQ ID NO: 13257
  source 1..80: mol_type = other DNA

SEQ ID NO: 71559 - DNA, 80 bp, synthetic construct; identical to SEQ ID NO: 37504
  source 1..80: mol_type = other DNA

SEQ ID NO: 71560 - DNA, 80 bp, synthetic construct; identical to SEQ ID NO: 37505
  source 1..80: mol_type = other DNA

SEQ ID NO: 71561 - DNA, 80 bp, synthetic construct; identical to SEQ ID NO: 37506
  source 1..80: mol_type = other DNA

SEQ ID NO: 71562 - DNA, 80 bp, synthetic construct; identical to SEQ ID NO: 13258
  source 1..80: mol_type = other DNA

SEQ ID NO: 71563 - DNA, 80 bp, synthetic construct; identical to SEQ ID NO: 37508
  source 1..80: mol_type = other DNA

SEQ ID NO: 71564 - DNA, 80 bp, synthetic construct; identical to SEQ ID NO: 37509
  source 1..80: mol_type = other DNA

SEQ ID NO: 71565 - DNA, 80 bp, synthetic construct; identical to SEQ ID NO: 37510
  source 1..80: mol_type = other DNA

SEQ ID NO: 71566 - DNA, 80 bp, synthetic construct; identical to SEQ ID NO: 37511
  source 1..80: mol_type = other DNA

SEQ ID NO: 71567 - DNA, 80 bp, synthetic construct; identical to SEQ ID NO: 13259
  source 1..80: mol_type = other DNA

SEQ ID NO: 71568 - DNA, 80 bp, synthetic construct; identical to SEQ ID NO: 37513
  source 1..80: mol_type = other DNA

SEQ ID NO: 71569 - DNA, 80 bp, synthetic construct; identical to SEQ ID NO: 37514
  source 1..80: mol_type = other DNA

SEQ ID NO: 71570 - DNA, 80 bp, synthetic construct; identical to SEQ ID NO: 13260
  source 1..80: mol_type = other DNA

SEQ ID NO: 71571 - DNA, 80 bp, synthetic construct; identical to SEQ ID NO: 37516
  source 1..80: mol_type = other DNA

SEQ ID NO: 71572 - DNA, 80 bp, synthetic construct; identical to SEQ ID NO: 37517
  source 1..80: mol_type = other DNA

SEQ ID NO: 71573 - DNA, 80 bp, synthetic construct; identical to SEQ ID NO: 37518
  source 1..80: mol_type = other DNA

SEQ ID NO: 71574 - DNA, 80 bp, synthetic construct; identical to SEQ ID NO: 13261
  source 1..80: mol_type = other DNA

SEQ ID NO: 71575 - DNA, 80 bp, synthetic construct; identical to SEQ ID NO: 37520
  source 1..80: mol_type = other DNA

SEQ ID NO: 71576 - DNA, 80 bp, synthetic construct; identical to SEQ ID NO: 37521
  source 1..80: mol_type = other DNA

SEQ ID NO: 71577 - DNA, 80 bp, synthetic construct; identical to SEQ ID NO: 37522
  source 1..80: mol_type = other DNA

SEQ ID NO: 71578 - DNA, 80 bp, synthetic construct; identical to SEQ ID NO: 13262
  source 1..80: mol_type = other DNA

SEQ ID NO: 71579 - DNA, 80 bp, synthetic construct; identical to SEQ ID NO: 37524
  source 1..80: mol_type = other DNA

SEQ ID NO: 71580 - DNA, 80 bp, synthetic construct; identical to SEQ ID NO: 37525
  source 1..80: mol_type = other DNA

SEQ ID NO: 71581 - DNA, 80 bp, synthetic construct; identical to SEQ ID NO: 37526
  source 1..80: mol_type = other DNA

SEQ ID NO: 71582 - DNA, 80 bp, synthetic construct; identical to SEQ ID NO: 13263
  source 1..80: mol_type = other DNA

SEQ ID NO: 71583 - DNA, 80 bp, synthetic construct; identical to SEQ ID NO: 37528
  source 1..80: mol_type = other DNA

SEQ ID NO: 71584 - DNA, 80 bp, synthetic construct; identical to SEQ ID NO: 37529
  source 1..80: mol_type = other DNA

SEQ ID NO: 71585 - DNA, 80 bp, synthetic construct; identical to SEQ ID NO: 37530
  source 1..80: mol_type = other DNA

SEQ ID NO: 71586 - DNA, 80 bp, synthetic construct; identical to SEQ ID NO: 37531
  source 1..80: mol_type = other DNA

SEQ ID NO: 71587 - DNA, 80 bp, synthetic construct; identical to SEQ ID NO: 13264
  source 1..80: mol_type = other DNA

SEQ ID NO: 71588 - DNA, 80 bp, synthetic construct; identical to SEQ ID NO: 37533
  source 1..80: mol_type = other DNA

SEQ ID NO: 71589 - DNA, 80 bp, synthetic construct; identical to SEQ ID NO: 37534
  source 1..80: mol_type = other DNA

SEQ ID NO: 71590 - DNA, 80 bp, synthetic construct; identical to SEQ ID NO: 13265
  source 1..80: mol_type = other DNA

SEQ ID NO: 71591 - DNA, 80 bp, synthetic construct; identical to SEQ ID NO: 37536
  source 1..80: mol_type = other DNA

SEQ ID NO: 71592 - DNA, 80 bp, synthetic construct; identical to SEQ ID NO: 37537
  source 1..80: mol_type = other DNA

SEQ ID NO: 71593 - DNA, 80 bp, synthetic construct; identical to SEQ ID NO: 37538
  source 1..80: mol_type = other DNA

SEQ ID NO: 71594 - DNA, 80 bp, synthetic construct; identical to SEQ ID NO: 13266
  source 1..80: mol_type = other DNA

SEQ ID NO: 71595 - DNA, 80 bp, synthetic construct; identical to SEQ ID NO: 37540
  source 1..80: mol_type = other DNA

SEQ ID NO: 71596 - DNA, 80 bp, synthetic construct; identical to SEQ ID NO: 37541
  source 1..80: mol_type = other DNA

SEQ ID NO: 71597 - DNA, 80 bp, synthetic construct; identical to SEQ ID NO: 37542
  source 1..80: mol_type = other DNA

SEQ ID NO: 71598 - DNA, 80 bp, synthetic construct; identical to SEQ ID NO: 13267
  source 1..80: mol_type = other DNA

SEQ ID NO: 71599 - DNA, 80 bp, synthetic construct; identical to SEQ ID NO: 37544
  source 1..80: mol_type = other DNA

SEQ ID NO: 71600 - DNA, 80 bp, synthetic construct; identical to SEQ ID NO: 37545
  source 1..80: mol_type = other DNA

SEQ ID NO: 71601 - DNA, 80 bp, synthetic construct; identical to SEQ ID NO: 37546
  source 1..80: mol_type = other DNA

SEQ ID NO: 71602 - DNA, 80 bp, synthetic construct; identical to SEQ ID NO: 13268
  source 1..80: mol_type = other DNA

SEQ ID NO: 71603 - DNA, 80 bp, synthetic construct; identical to SEQ ID NO: 37548
  source 1..80: mol_type = other DNA

SEQ ID NO: 71604 - DNA, 80 bp, synthetic construct; identical to SEQ ID NO: 37549
  source 1..80: mol_type = other DNA

SEQ ID NO: 71605 - DNA, 80 bp, synthetic construct; identical to SEQ ID NO: 37550
  source 1..80: mol_type = other DNA

SEQ ID NO: 71606 - DNA, 80 bp, synthetic construct; identical to SEQ ID NO: 13269
  source 1..80: mol_type = other DNA

SEQ ID NO: 71607 - DNA, 80 bp, synthetic construct; identical to SEQ ID NO: 37552
  source 1..80: mol_type = other DNA

SEQ ID NO: 71608 - DNA, 80 bp, synthetic construct; identical to SEQ ID NO: 37553
  source 1..80: mol_type = other DNA

SEQ ID NO: 71609 - DNA, 80 bp, synthetic construct; identical to SEQ ID NO: 37554
  source 1..80: mol_type = other DNA

SEQ ID NO: 71610 - DNA, 80 bp, synthetic construct; identical to SEQ ID NO: 37555
  source 1..80: mol_type = other DNA

SEQ ID NO: 71611 - DNA, 80 bp, synthetic construct; identical to SEQ ID NO: 13270
  source 1..80: mol_type = other DNA

SEQ ID NO: 71612 - DNA, 80 bp, synthetic construct; identical to SEQ ID NO: 37557
  source 1..80: mol_type = other DNA

SEQ ID NO: 71613 - DNA, 80 bp, synthetic construct; identical to SEQ ID NO: 37558
  source 1..80: mol_type = other DNA

SEQ ID NO: 71614 - DNA, 80 bp, synthetic construct; identical to SEQ ID NO: 37559
  source 1..80: mol_type = other DNA

SEQ ID NO: 71615 - DNA, 80 bp, synthetic construct; identical to SEQ ID NO: 13271
  source 1..80: mol_type = other DNA

SEQ ID NO: 71616 - DNA, 80 bp, synthetic construct; identical to SEQ ID NO: 37561
  source 1..80: mol_type = other DNA

SEQ ID NO: 71617 - DNA, 80 bp, synthetic construct; identical to SEQ ID NO: 37562
  source 1..80: mol_type = other DNA

SEQ ID NO: 71618 - DNA, 80 bp, synthetic construct; identical to SEQ ID NO: 37563
  source 1..80: mol_type = other DNA

SEQ ID NO: 71619 - DNA, 80 bp, synthetic construct; identical to SEQ ID NO: 13272
  source 1..80: mol_type = other DNA

SEQ ID NO: 71620 - DNA, 80 bp, synthetic construct; identical to SEQ ID NO: 37565
  source 1..80: mol_type = other DNA

SEQ ID NO: 71621 - DNA, 80 bp, synthetic construct; identical to SEQ ID NO: 37566
  source 1..80: mol_type = other DNA

SEQ ID NO: 71622 - DNA, 80 bp, synthetic construct; identical to SEQ ID NO: 37567
  source 1..80: mol_type = other DNA

SEQ ID NO: 71623 - DNA, 80 bp, synthetic construct; identical to SEQ ID NO: 37568
  source 1..80: mol_type = other DNA

SEQ ID NO: 71624 - DNA, 80 bp, synthetic construct; identical to SEQ ID NO: 13273
  source 1..80: mol_type = other DNA

SEQ ID NO: 71625 - DNA, 80 bp, synthetic construct; identical to SEQ ID NO: 37570
  source 1..80: mol_type = other DNA

SEQ ID NO: 71626 - DNA, 80 bp, synthetic construct; identical to SEQ ID NO: 37571
  source 1..80: mol_type = other DNA

SEQ ID NO: 71627 - DNA, 80 bp, synthetic construct; identical to SEQ ID NO: 13274
  source 1..80: mol_type = other DNA

SEQ ID NO: 71628 - DNA, 80 bp, synthetic construct; identical to SEQ ID NO: 37573
  source 1..80: mol_type = other DNA

SEQ ID NO: 71629 - DNA, 80 bp, synthetic construct; identical to SEQ ID NO: 37574
  source 1..80: mol_type = other DNA

SEQ ID NO: 71630 - DNA, 80 bp, synthetic construct; identical to SEQ ID NO: 37575
  source 1..80: mol_type = other DNA

SEQ ID NO: 71631 - DNA, 80 bp, synthetic construct; identical to SEQ ID NO: 13275
  source 1..80: mol_type = other DNA

SEQ ID NO: 71632 - DNA, 80 bp, synthetic construct; identical to SEQ ID NO: 37577
  source 1..80: mol_type = other DNA

SEQ ID NO: 71633 - DNA, 80 bp, synthetic construct; identical to SEQ ID NO: 37578
  source 1..80: mol_type = other DNA

SEQ ID NO: 71634 - DNA, 80 bp, synthetic construct; identical to SEQ ID NO: 37579
  source 1..80: mol_type = other DNA

SEQ ID NO: 71635 - DNA, 80 bp, synthetic construct; identical to SEQ ID NO: 13276
  source 1..80: mol_type = other DNA

SEQ ID NO: 71636 - DNA, 80 bp, synthetic construct; identical to SEQ ID NO: 37582
  source 1..80: mol_type = other DNA

SEQ ID NO: 71637 - DNA, 80 bp, synthetic construct; identical to SEQ ID NO: 37583
  source 1..80: mol_type = other DNA

SEQ ID NO: 71638 - DNA, 80 bp, synthetic construct; identical to SEQ ID NO: 13277
  source 1..80: mol_type = other DNA

SEQ ID NO: 71639 - DNA, 80 bp, synthetic construct; identical to SEQ ID NO: 37585
  source 1..80: mol_type = other DNA

SEQ ID NO: 71640 - DNA, 80 bp, synthetic construct; identical to SEQ ID NO: 37586
  source 1..80: mol_type = other DNA

SEQ ID NO: 71641 - DNA, 80 bp, synthetic construct; identical to SEQ ID NO: 37588
  source 1..80: mol_type = other DNA

SEQ ID NO: 71642 - DNA, 80 bp, synthetic construct; identical to SEQ ID NO: 13278
  source 1..80: mol_type = other DNA

SEQ ID NO: 71643 - DNA, 80 bp, synthetic construct; identical to SEQ ID NO: 37590
  source 1..80: mol_type = other DNA

SEQ ID NO: 71644 - DNA, 80 bp, synthetic construct; identical to SEQ ID NO: 37592
  source 1..80: mol_type = other DNA

SEQ ID NO: 71645 - DNA, 80 bp, synthetic construct; identical to SEQ ID NO: 13279
  source 1..80: mol_type = other DNA

SEQ ID NO: 71646 - DNA, 80 bp, synthetic construct; identical to SEQ ID NO: 37594
  source 1..80: mol_type = other DNA

SEQ ID NO: 71647 - DNA, 80 bp, synthetic construct; identical to SEQ ID NO: 37595
  source 1..80: mol_type = other DNA

SEQ ID NO: 71648 - DNA, 80 bp, synthetic construct; identical to SEQ ID NO: 13280
  source 1..80: mol_type = other DNA

SEQ ID NO: 71649 - DNA, 80 bp, synthetic construct; identical to SEQ ID NO: 37598
  source 1..80: mol_type = other DNA

SEQ ID NO: 71650 - DNA, 80 bp, synthetic construct; identical to SEQ ID NO: 37599
  source 1..80: mol_type = other DNA

SEQ ID NO: 71651 - DNA, 80 bp, synthetic construct; identical to SEQ ID NO: 37600
  source 1..80: mol_type = other DNA

SEQ ID NO: 71652 - DNA, 80 bp, synthetic construct; identical to SEQ ID NO: 13281
  source 1..80: mol_type = other DNA

SEQ ID NO: 71653 - DNA, 80 bp, synthetic construct; identical to SEQ ID NO: 37602
  source 1..80: mol_type = other DNA

SEQ ID NO: 71654 - DNA, 80 bp, synthetic construct; identical to SEQ ID NO: 37603
  source 1..80: mol_type = other DNA

SEQ ID NO: 71655 - DNA, 80 bp, synthetic construct; identical to SEQ ID NO: 13282
  source 1..80: mol_type = other DNA

SEQ ID NO: 71656 - DNA, 80 bp, synthetic construct; identical to SEQ ID NO: 37605
  source 1..80: mol_type = other DNA

SEQ ID NO: 71657 - DNA, 80 bp, synthetic construct; identical to SEQ ID NO: 37606
  source 1..80: mol_type = other DNA

SEQ ID NO: 71658 - DNA, 80 bp, synthetic construct; identical to SEQ ID NO: 37607
  source 1..80: mol_type = other DNA

SEQ ID NO: 71659 - DNA, 80 bp, synthetic construct; identical to SEQ ID NO: 37608
  source 1..80: mol_type = other DNA

SEQ ID NO: 71660 - DNA, 80 bp, synthetic construct; identical to SEQ ID NO: 13283
  source 1..80: mol_type = other DNA

SEQ ID NO: 71661 - DNA, 80 bp, synthetic construct; identical to SEQ ID NO: 37610
  source 1..80: mol_type = other DNA

SEQ ID NO: 71662 - DNA, 80 bp, synthetic construct; identical to SEQ ID NO: 37611
  source 1..80: mol_type = other DNA

SEQ ID NO: 71663 - DNA, 80 bp, synthetic construct; identical to SEQ ID NO: 37612
  source 1..80: mol_type = other DNA

SEQ ID NO: 71664 - DNA, 80 bp, synthetic construct; identical to SEQ ID NO: 13284
  source 1..80: mol_type = other DNA

SEQ ID NO: 71665 - DNA, 80 bp, synthetic construct; identical to SEQ ID NO: 37614
  source 1..80: mol_type = other DNA

SEQ ID NO: 71666 - DNA, 80 bp, synthetic construct; identical to SEQ ID NO: 37615
  source 1..80: mol_type = other DNA

SEQ ID NO: 71667 - DNA, 80 bp, synthetic construct; identical to SEQ ID NO: 13285
  source 1..80: mol_type = other DNA

SEQ ID NO: 71668 - DNA, 80 bp, synthetic construct; identical to SEQ ID NO: 37617
  source 1..80: mol_type = other DNA

SEQ ID NO: 71669 - DNA, 80 bp, synthetic construct; identical to SEQ ID NO: 37618
  source 1..80: mol_type = other DNA

SEQ ID NO: 71670 - DNA, 80 bp, synthetic construct; identical to SEQ ID NO: 37619
  source 1..80: mol_type = other DNA

SEQ ID NO: 71671 - DNA, 80 bp, synthetic construct; identical to SEQ ID NO: 13286
  source 1..80: mol_type = other DNA

SEQ ID NO: 71672 - DNA, 80 bp, synthetic construct; identical to SEQ ID NO: 37621
  source 1..80: mol_type = other DNA

SEQ ID NO: 71673 - DNA, 80 bp, synthetic construct; identical to SEQ ID NO: 37622
  source 1..80: mol_type = other DNA

SEQ ID NO: 71674 - DNA, 80 bp, synthetic construct; identical to SEQ ID NO: 37623
  source 1..80: mol_type = other DNA

SEQ ID NO: 71675 - DNA, 80 bp, synthetic construct; identical to SEQ ID NO: 13287
  source 1..80: mol_type = other DNA

SEQ ID NO: 71676 - DNA, 80 bp, synthetic construct; identical to SEQ ID NO: 37625
  source 1..80: mol_type = other DNA

SEQ ID NO: 71677 - DNA, 80 bp, synthetic construct; identical to SEQ ID NO: 37626
  source 1..80: mol_type = other DNA

SEQ ID NO: 71678 - DNA, 80 bp, synthetic construct; identical to SEQ ID NO: 37627
  source 1..80: mol_type = other DNA

SEQ ID NO: 71679 - DNA, 80 bp, synthetic construct; identical to SEQ ID NO: 37628
  source 1..80: mol_type = other DNA

SEQ ID NO: 71680 - DNA, 80 bp, synthetic construct; identical to SEQ ID NO: 13288
  source 1..80: mol_type = other DNA

SEQ ID NO: 71681 - DNA, 80 bp, synthetic construct; identical to SEQ ID NO: 37630
  source 1..80: mol_type = other DNA

SEQ ID NO: 71682 - DNA, 80 bp, synthetic construct; identical to SEQ ID NO: 37631
  source 1..80: mol_type = other DNA

SEQ ID NO: 71683 - DNA, 80 bp, synthetic construct; identical to SEQ ID NO: 37632
  source 1..80: mol_type = other DNA

SEQ ID NO: 71684 - DNA, 80 bp, synthetic construct; identical to SEQ ID NO: 13289
  source 1..80: mol_type = other DNA

SEQ ID NO: 71685 - DNA, 80 bp, synthetic construct; identical to SEQ ID NO: 37634
  source 1..80: mol_type = other DNA

SEQ ID NO: 71686 - DNA, 80 bp, synthetic construct; identical to SEQ ID NO: 37635
  source 1..80: mol_type = other DNA

SEQ ID NO: 71687 - DNA, 80 bp, synthetic construct; identical to SEQ ID NO: 13290
  source 1..80: mol_type = other DNA

SEQ ID NO: 71688 - DNA, 80 bp, synthetic construct; identical to SEQ ID NO: 37637
  source 1..80: mol_type = other DNA

SEQ ID NO: 71689 - DNA, 80 bp, synthetic construct; identical to SEQ ID NO: 37638
  source 1..80: mol_type = other DNA

SEQ ID NO: 71690 - DNA, 80 bp, synthetic construct; identical to SEQ ID NO: 37639
  source 1..80: mol_type = other DNA

SEQ ID NO: 71691 - DNA, 80 bp, synthetic construct; identical to SEQ ID NO: 13291
  source 1..80: mol_type = other DNA

SEQ ID NO: 71692 - DNA, 80 bp, synthetic construct; identical to SEQ ID NO: 37641
  source 1..80: mol_type = other DNA

SEQ ID NO: 71693 - DNA, 80 bp, synthetic construct; identical to SEQ ID NO: 37642
  source 1..80: mol_type = other DNA

SEQ ID NO: 71694 - DNA, 80 bp, synthetic construct; identical to SEQ ID NO: 37643
  source 1..80: mol_type = other DNA

SEQ ID NO: 71695 - DNA, 80 bp, synthetic construct; identical to SEQ ID NO: 37644
  source 1..80: mol_type = other DNA

SEQ ID NO: 71696 - DNA, 80 bp, synthetic construct; identical to SEQ ID NO: 13292
  source 1..80: mol_type = other DNA

SEQ ID NO: 71697 - DNA, 80 bp, synthetic construct; identical to SEQ ID NO: 37646
  source 1..80: mol_type = other DNA

SEQ ID NO: 71698 - DNA, 80 bp, synthetic construct; identical to SEQ ID NO: 37647
  source 1..80: mol_type = other DNA

SEQ ID NO: 71699 - DNA, 80 bp, synthetic construct; identical to SEQ ID NO: 37648
  source 1..80: mol_type = other DNA

SEQ ID NO: 71700 - DNA, 80 bp, synthetic construct; identical to SEQ ID NO: 13293
  source 1..80: mol_type = other DNA

SEQ ID NO: 71701 - DNA, 80 bp, synthetic construct; identical to SEQ ID NO: 37650
  source 1..80: mol_type = other DNA

SEQ ID NO: 71702 - DNA, 80 bp, synthetic construct; identical to SEQ ID NO: 37651
  source 1..80: mol_type = other DNA

SEQ ID NO: 71703 - DNA, 80 bp, synthetic construct; identical to SEQ ID NO: 13294
  source 1..80: mol_type = other DNA

SEQ ID NO: 71704 - DNA, 80 bp, synthetic construct; identical to SEQ ID NO: 37653
  source 1..80: mol_type = other DNA

SEQ ID NO: 71705 - DNA, 80 bp, synthetic construct; identical to SEQ ID NO: 37654
  source 1..80: mol_type = other DNA

SEQ ID NO: 71706 - DNA, 80 bp, synthetic construct; identical to SEQ ID NO: 37655
  source 1..80: mol_type = other DNA

SEQ ID NO: 71707 - DNA, 80 bp, synthetic construct; identical to SEQ ID NO: 37656
  source 1..80: mol_type = other DNA

SEQ ID NO: 71708 - DNA, 80 bp, synthetic construct; identical to SEQ ID NO: 37657
  source 1..80: mol_type = other DNA

SEQ ID NO: 71709 - DNA, 80 bp, synthetic construct; identical to SEQ ID NO: 37658
  source 1..80: mol_type = other DNA

SEQ ID NO: 71710 - DNA, 80 bp, synthetic construct; identical to SEQ ID NO: 37659
  source 1..80: mol_type = other DNA

SEQ ID NO: 71711 - DNA, 80 bp, synthetic construct; identical to SEQ ID NO: 37660
  source 1..80: mol_type = other DNA

SEQ ID NO: 71712 - DNA, 80 bp, synthetic construct; identical to SEQ ID NO: 13295
  source 1..80: mol_type = other DNA

SEQ ID NO: 71713 - DNA, 80 bp, synthetic construct; identical to SEQ ID NO: 37662
  source 1..80: mol_type = other DNA

SEQ ID NO: 71714 - DNA, 80 bp, synthetic construct; identical to SEQ ID NO: 13296
  source 1..80: mol_type = other DNA

SEQ ID NO: 71715 - DNA, 80 bp, synthetic construct; identical to SEQ ID NO: 37664
  source 1..80: mol_type = other DNA

SEQ ID NO: 71716 - DNA, 80 bp, synthetic construct; identical to SEQ ID NO: 13297
  source 1..80: mol_type = other DNA

SEQ ID NO: 71717 - DNA, 80 bp, synthetic construct; identical to SEQ ID NO: 37667
  source 1..80: mol_type = other DNA

SEQ ID NO: 71718 - DNA, 80 bp, synthetic construct; identical to SEQ ID NO: 37668
  source 1..80: mol_type = other DNA

SEQ ID NO: 71719 - DNA, 80 bp, synthetic construct; identical to SEQ ID NO: 37669
  source 1..80: mol_type = other DNA

SEQ ID NO: 71720 - DNA, 80 bp, synthetic construct; identical to SEQ ID NO: 13298
  source 1..80: mol_type = other DNA

SEQ ID NO: 71721 - DNA, 80 bp, synthetic construct; identical to SEQ ID NO: 37671
  source 1..80: mol_type = other DNA

SEQ ID NO: 71722 - DNA, 80 bp, synthetic construct; identical to SEQ ID NO: 37673
  source 1..80: mol_type = other DNA

SEQ ID NO: 71723 - DNA, 80 bp, synthetic construct; identical to SEQ ID NO: 13299
  source 1..80: mol_type = other DNA

SEQ ID NO: 71724 - DNA, 80 bp, synthetic construct; identical to SEQ ID NO: 37676
  source 1..80: mol_type = other DNA

SEQ ID NO: 71725 - DNA, 80 bp, synthetic construct; identical to SEQ ID NO: 13300
  source 1..80: mol_type = other DNA

SEQ ID NO: 71726 - DNA, 80 bp, synthetic construct; identical to SEQ ID NO: 37680
  source 1..80: mol_type = other DNA

SEQ ID NO: 71727 - DNA, 80 bp, synthetic construct; identical to SEQ ID NO: 37681
  source 1..80: mol_type = other DNA

SEQ ID NO: 71728 - DNA, 80 bp, synthetic construct; identical to SEQ ID NO: 13301
  source 1..80: mol_type = other DNA

SEQ ID NO: 71729 - DNA, 80 bp, synthetic construct; identical to SEQ ID NO: 37684
  source 1..80: mol_type = other DNA

SEQ ID NO: 71730 - DNA, 80 bp, synthetic construct; identical to SEQ ID NO: 37685
  source 1..80: mol_type = other DNA

SEQ ID NO: 71731 - DNA, 80 bp, synthetic construct; identical to SEQ ID NO: 13302
  source 1..80: mol_type = other DNA

SEQ ID NO: 71732 - DNA, 80 bp, synthetic construct; identical to SEQ ID NO: 37687
  source 1..80: mol_type = other DNA

SEQ ID NO: 71733 - DNA, 80 bp, synthetic construct; identical to SEQ ID NO: 37688
  source 1..80: mol_type = other DNA

SEQ ID NO: 71734 - DNA, 80 bp, synthetic construct; identical to SEQ ID NO: 37689
  source 1..80: mol_type = other DNA

SEQ ID NO: 71735 - DNA, 80 bp, synthetic construct; identical to SEQ ID NO: 13303
  source 1..80: mol_type = other DNA

SEQ ID NO: 71736 - DNA, 80 bp, synthetic construct; identical to SEQ ID NO: 37691
  source 1..80: mol_type = other DNA

SEQ ID NO: 71737 - DNA, 80 bp, synthetic construct; identical to SEQ ID NO: 37692
  source 1..80: mol_type = other DNA

SEQ ID NO: 71738 - DNA, 80 bp, synthetic construct; identical to SEQ ID NO: 37693
  source 1..80: mol_type = other DNA

SEQ ID NO: 71739 - DNA, 80 bp, synthetic construct; identical to SEQ ID NO: 37694
  source 1..80: mol_type = other DNA

SEQ ID NO: 71740 - DNA, 80 bp, synthetic construct; identical to SEQ ID NO: 13304
  source 1..80: mol_type = other DNA

SEQ ID NO: 71741 - DNA, 80 bp, synthetic construct; identical to SEQ ID NO: 37696
  source 1..80: mol_type = other DNA

SEQ ID NO: 71742 - DNA, 80 bp, synthetic construct; identical to SEQ ID NO: 37697
  source 1..80: mol_type = other DNA

SEQ ID NO: 71743 - DNA, 80 bp, synthetic construct; identical to SEQ ID NO: 13305
  source 1..80: mol_type = other DNA

SEQ ID NO: 71744 - DNA, 80 bp, synthetic construct; identical to SEQ ID NO: 37700
  source 1..80: mol_type = other DNA

SEQ ID NO: 71745 - DNA, 80 bp, synthetic construct; identical to SEQ ID NO: 37701
  source 1..80: mol_type = other DNA

SEQ ID NO: 71746 - DNA, 80 bp, synthetic construct; identical to SEQ ID NO: 13306
  source 1..80: mol_type = other DNA

SEQ ID NO: 71747 - DNA, 80 bp, synthetic construct; identical to SEQ ID NO: 37704
  source 1..80: mol_type = other DNA

SEQ ID NO: 71748 - DNA, 80 bp, synthetic construct; identical to SEQ ID NO: 37705
  source 1..80: mol_type = other DNA

SEQ ID NO: 71749 - DNA, 80 bp, synthetic construct; identical to SEQ ID NO: 13307
  source 1..80: mol_type = other DNA

SEQ ID NO: 71750 - DNA, 80 bp, synthetic construct; identical to SEQ ID NO: 37708
  source 1..80: mol_type = other DNA

SEQ ID NO: 71751 - DNA, 80 bp, synthetic construct; identical to SEQ ID NO: 37709
  source 1..80: mol_type = other DNA

SEQ ID NO: 71752 - DNA, 80 bp, synthetic construct; identical to SEQ ID NO: 13308
  source 1..80: mol_type = other DNA

SEQ ID NO: 71753 - DNA, 80 bp, synthetic construct; identical to SEQ ID NO: 37711
  source 1..80: mol_type = other DNA

SEQ ID NO: 71754 - DNA, 80 bp, synthetic construct; identical to SEQ ID NO: 37712
  source 1..80: mol_type = other DNA

SEQ ID NO: 71755 - DNA, 80 bp, synthetic construct; identical to SEQ ID NO: 37713
  source 1..80: mol_type = other DNA

SEQ ID NO: 71756 - DNA, 80 bp, synthetic construct; identical to SEQ ID NO: 37714
  source 1..80: mol_type = other DNA

SEQ ID NO: 71757 - DNA, 80 bp, synthetic construct; identical to SEQ ID NO: 13309
  source 1..80: mol_type = other DNA

SEQ ID NO: 71758 - DNA, 80 bp, synthetic construct; identical to SEQ ID NO: 37716
  source 1..80: mol_type = other DNA

SEQ ID NO: 71759 - DNA, 80 bp, synthetic construct; identical to SEQ ID NO: 37717
  source 1..80: mol_type = other DNA

SEQ ID NO: 71760 - DNA, 80 bp, synthetic construct; identical to SEQ ID NO: 13310
  source 1..80: mol_type = other DNA

SEQ ID NO: 71761 - DNA, 80 bp, synthetic construct; identical to SEQ ID NO: 37719
  source 1..80: mol_type = other DNA

SEQ ID NO: 71762 - DNA, 80 bp, synthetic construct; identical to SEQ ID NO: 37720
  source 1..80: mol_type = other DNA

SEQ ID NO: 71763 - DNA, 80 bp, synthetic construct; identical to SEQ ID NO: 37721
  source 1..80: mol_type = other DNA

SEQ ID NO: 71764 - DNA, 80 bp, synthetic construct; identical to SEQ ID NO: 37722
  source 1..80: mol_type = other DNA

SEQ ID NO: 71765 - DNA, 80 bp, synthetic construct; identical to SEQ ID NO: 13311
  source 1..80: mol_type = other DNA

SEQ ID NO: 71766 - DNA, 80 bp, synthetic construct; identical to SEQ ID NO: 37724
  source 1..80: mol_type = other DNA

SEQ ID NO: 71767 - DNA, 80 bp, synthetic construct; identical to SEQ ID NO: 37725
  source 1..80: mol_type = other DNA

SEQ ID NO: 71768 - DNA, 80 bp, synthetic construct; identical to SEQ ID NO: 13312
  source 1..80: mol_type = other DNA

SEQ ID NO: 71769 - DNA, 80 bp, synthetic construct; identical to SEQ ID NO: 37727
  source 1..80: mol_type = other DNA

SEQ ID NO: 71770 - DNA, 80 bp, synthetic construct; identical to SEQ ID NO: 37728
  source 1..80: mol_type = other DNA

SEQ ID NO: 71771 - DNA, 80 bp, synthetic construct; identical to SEQ ID NO: 37729
  source 1..80: mol_type = other DNA

SEQ ID NO: 71772 - DNA, 80 bp, synthetic construct; identical to SEQ ID NO: 13313
  source 1..80: mol_type = other DNA

SEQ ID NO: 71773 - DNA, 80 bp, synthetic construct; identical to SEQ ID NO: 37732
  source 1..80: mol_type = other DNA

SEQ ID NO: 71774 - DNA, 80 bp, synthetic construct; identical to SEQ ID NO: 37733
  source 1..80: mol_type = other DNA

SEQ ID NO: 71775 - DNA, 80 bp, synthetic construct; identical to SEQ ID NO: 13314
  source 1..80: mol_type = other DNA

SEQ ID NO: 71776 - DNA, 80 bp, synthetic construct; identical to SEQ ID NO: 37735
  source 1..80: mol_type = other DNA

SEQ ID NO: 71777 - DNA, 80 bp, synthetic construct; identical to SEQ ID NO: 37736
  source 1..80: mol_type = other DNA

SEQ ID NO: 71778 - DNA, 80 bp, synthetic construct; identical to SEQ ID NO: 37737
  source 1..80: mol_type = other DNA

SEQ ID NO: 71779 - DNA, 80 bp, synthetic construct; identical to SEQ ID NO: 37738
  source 1..80: mol_type = other DNA

SEQ ID NO: 71780 - DNA, 80 bp, synthetic construct; identical to SEQ ID NO: 13315
  source 1..80: mol_type = other DNA

SEQ ID NO: 71781 - DNA, 80 bp, synthetic construct; identical to SEQ ID NO: 37740
  source 1..80: mol_type = other DNA

SEQ ID NO: 71782 - DNA, 80 bp, synthetic construct; identical to SEQ ID NO: 37741
  source 1..80: mol_type = other DNA

SEQ ID NO: 71783 - DNA, 80 bp, synthetic construct; identical to SEQ ID NO: 37742
  source 1..80: mol_type = other DNA

SEQ ID NO: 71784 - DNA, 80 bp, synthetic construct; identical to SEQ ID NO: 13316
  source 1..80: mol_type = other DNA

SEQ ID NO: 71785 - DNA, 80 bp, synthetic construct; identical to SEQ ID NO: 37745
  source 1..80: mol_type = other DNA

SEQ ID NO: 71786 - DNA, 80 bp, synthetic construct; identical to SEQ ID NO: 13317
  source 1..80: mol_type = other DNA

SEQ ID NO: 71787 - DNA, 80 bp, synthetic construct; identical to SEQ ID NO: 37747
  source 1..80: mol_type = other DNA

SEQ ID NO: 71788 - DNA, 80 bp, synthetic construct; identical to SEQ ID NO: 37748
  source 1..80: mol_type = other DNA

SEQ ID NO: 71789 - DNA, 80 bp, synthetic construct; identical to SEQ ID NO: 37749
  source 1..80: mol_type = other DNA

SEQ ID NO: 71790 - DNA, 80 bp, synthetic construct; identical to SEQ ID NO: 37750
  source 1..80: mol_type = other DNA

SEQ ID NO: 71791 - DNA, 80 bp, synthetic construct; identical to SEQ ID NO: 13318
  source 1..80: mol_type = other DNA

SEQ ID NO: 71792 - DNA, 80 bp, synthetic construct; identical to SEQ ID NO: 37752
  source 1..80: mol_type = other DNA

SEQ ID NO: 71793 - DNA, 80 bp, synthetic construct; identical to SEQ ID NO: 37753
  source 1..80: mol_type = other DNA

SEQ ID NO: 71794 - DNA, 80 bp, synthetic construct; identical to SEQ ID NO: 37754
  source 1..80: mol_type = other DNA

SEQ ID NO: 71795 - DNA, 80 bp, synthetic construct; identical to SEQ ID NO: 13319
  source 1..80: mol_type = other DNA

SEQ ID NO: 71796 - DNA, 80 bp, synthetic construct; identical to SEQ ID NO: 37756
  source 1..80: mol_type = other DNA

SEQ ID NO: 71797 - DNA, 80 bp, synthetic construct; identical to SEQ ID NO: 37757
  source 1..80: mol_type = other DNA

SEQ ID NO: 71798 - DNA, 80 bp, synthetic construct; identical to SEQ ID NO: 13320
  source 1..80: mol_type = other DNA

SEQ ID NO: 71799 - DNA, 80 bp, synthetic construct; identical to SEQ ID NO: 37760
  source 1..80: mol_type = other DNA

SEQ ID NO: 71800 - DNA, 80 bp, synthetic construct; identical to SEQ ID NO: 37761
  source 1..80: mol_type = other DNA

SEQ ID NO: 71801 - DNA, 80 bp, synthetic construct; identical to SEQ ID NO: 13321
  source 1..80: mol_type = other DNA

SEQ ID NO: 71802 - DNA, 80 bp, synthetic construct; identical to SEQ ID NO: 37763
  source 1..80: mol_type = other DNA

SEQ ID NO: 71803 - DNA, 80 bp, synthetic construct; identical to SEQ ID NO: 37764
  source 1..80: mol_type = other DNA

SEQ ID NO: 71804 - DNA, 80 bp, synthetic construct; identical to SEQ ID NO: 37765
  source 1..80: mol_type = other DNA

SEQ ID NO: 71805 - DNA, 80 bp, synthetic construct; identical to SEQ ID NO: 13322
  source 1..80: mol_type = other DNA

SEQ ID NO: 71806 - DNA, 80 bp, synthetic construct; identical to SEQ ID NO: 37767
  source 1..80: mol_type = other DNA

SEQ ID NO: 71807 - DNA, 80 bp, synthetic construct; identical to SEQ ID NO: 37768
  source 1..80: mol_type = other DNA

SEQ ID NO: 71808 - DNA, 80 bp, synthetic construct; identical to SEQ ID NO: 37769
  source 1..80: mol_type = other DNA

SEQ ID NO: 71809 - DNA, 80 bp, synthetic construct; identical to SEQ ID NO: 37770
  source 1..80: mol_type = other DNA

SEQ ID NO: 71810 - DNA, 80 bp, synthetic construct; identical to SEQ ID NO: 13323
  source 1..80: mol_type = other DNA

SEQ ID NO: 71811 - DNA, 80 bp, synthetic construct; identical to SEQ ID NO: 37772
  source 1..80: mol_type = other DNA

SEQ ID NO: 71812 - DNA, 80 bp, synthetic construct; identical to SEQ ID NO: 37773
  source 1..80: mol_type = other DNA

SEQ ID NO: 71813 - DNA, 80 bp, synthetic construct; identical to SEQ ID NO: 37774
  source 1..80: mol_type = other DNA

SEQ ID NO: 71814 - DNA, 80 bp, synthetic construct; identical to SEQ ID NO: 13324
  source 1..80: mol_type = other DNA

SEQ ID NO: 71815 - DNA, 80 bp, synthetic construct; identical to SEQ ID NO: 37777
  source 1..80: mol_type = other DNA

SEQ ID NO: 71816 - DNA, 80 bp, synthetic construct; identical to SEQ ID NO: 37778
  source 1..80: mol_type = other DNA

SEQ ID NO: 71817 - DNA, 80 bp, synthetic construct; identical to SEQ ID NO: 37779
  source 1..80: mol_type = other DNA

SEQ ID NO: 71818 - DNA, 80 bp, synthetic construct; identical to SEQ ID NO: 13325
  source 1..80: mol_type = other DNA

SEQ ID NO: 71819 - DNA, 80 bp, synthetic construct; identical to SEQ ID NO: 37781
  source 1..80: mol_type = other DNA

SEQ ID NO: 71820 - DNA, 80 bp, synthetic construct; identical to SEQ ID NO: 37782
  source 1..80: mol_type = other DNA

SEQ ID NO: 71821 - DNA, 80 bp, synthetic construct; identical to SEQ ID NO: 37783
  source 1..80: mol_type = other DNA

SEQ ID NO: 71822 - DNA, 80 bp, synthetic construct; identical to SEQ ID NO: 13326
  source 1..80: mol_type = other DNA

SEQ ID NO: 71823 - DNA, 80 bp, synthetic construct; identical to SEQ ID NO: 37785
  source 1..80: mol_type = other DNA

SEQ ID NO: 71824 - DNA, 80 bp, synthetic construct; identical to SEQ ID NO: 37786
  source 1..80: mol_type = other DNA

SEQ ID NO: 71825 - DNA, 80 bp, synthetic construct; identical to SEQ ID NO: 37787
  source 1..80: mol_type = other DNA

SEQ ID NO: 71826 - DNA, 80 bp, synthetic construct; identical to SEQ ID NO: 13327
  source 1..80: mol_type = other DNA

SEQ ID NO: 71827 - DNA, 80 bp, synthetic construct; identical to SEQ ID NO: 37789
  source 1..80: mol_type = other DNA

SEQ ID NO: 71828 - DNA, 80 bp, synthetic construct; identical to SEQ ID NO: 37790
  source 1..80: mol_type = other DNA

SEQ ID NO: 71829 - DNA, 80 bp, synthetic construct; identical to SEQ ID NO: 37791
  source 1..80: mol_type = other DNA

SEQ ID NO: 71830 - DNA, 80 bp, synthetic construct; identical to SEQ ID NO: 13328
  source 1..80: mol_type = other DNA

SEQ ID NO: 71831 - DNA, 80 bp, synthetic construct; identical to SEQ ID NO: 37793
  source 1..80: mol_type = other DNA

SEQ ID NO: 71832 - DNA, 80 bp, synthetic construct; identical to SEQ ID NO: 37794
  source 1..80: mol_type = other DNA

SEQ ID NO: 71833 - DNA, 80 bp, synthetic construct; identical to SEQ ID NO: 37795
  source 1..80: mol_type = other DNA

SEQ ID NO: 71834 - DNA, 80 bp, synthetic construct; identical to SEQ ID NO: 37796
  source 1..80: mol_type = other DNA

SEQ ID NO: 71835 - DNA, 80 bp, synthetic construct; identical to SEQ ID NO: 13329
  source 1..80: mol_type = other DNA

SEQ ID NO: 71836 - DNA, 80 bp, synthetic construct; identical to SEQ ID NO: 37798
  source 1..80: mol_type = other DNA

SEQ ID NO: 71837 - DNA, 80 bp, synthetic construct; identical to SEQ ID NO: 37799
  source 1..80: mol_type = other DNA

SEQ ID NO: 71838 - DNA, 80 bp, synthetic construct; identical to SEQ ID NO: 13330
  source 1..80: mol_type = other DNA

SEQ ID NO: 71839 - DNA, 80 bp, synthetic construct; identical to SEQ ID NO: 37802
  source 1..80: mol_type = other DNA

SEQ ID NO: 71840 - DNA, 80 bp, synthetic construct; identical to SEQ ID NO: 13331
  source 1..80: mol_type = other DNA

SEQ ID NO: 71841 - DNA, 80 bp, synthetic construct; identical to SEQ ID NO: 37805
  source 1..80: mol_type = other DNA

SEQ ID NO: 71842 - DNA, 80 bp, synthetic construct; identical to SEQ ID NO: 37806
  source 1..80: mol_type = other DNA

SEQ ID NO: 71843 - DNA, 80 bp, synthetic construct; identical to SEQ ID NO: 37807
  source 1..80: mol_type = other DNA

SEQ ID NO: 71844 - DNA, 80 bp, synthetic construct; identical to SEQ ID NO: 13332
  source 1..80: mol_type = other DNA

SEQ ID NO: 71845 - DNA, 80 bp, synthetic construct; identical to SEQ ID NO: 37810
  source 1..80: mol_type = other DNA

SEQ ID NO: 71846 - DNA, 80 bp, synthetic construct; identical to SEQ ID NO: 37811
  source 1..80: mol_type = other DNA

SEQ ID NO: 71847 - DNA, 80 bp, synthetic construct; identical to SEQ ID NO: 37812
  source 1..80: mol_type = other DNA

SEQ ID NO: 71848 - DNA, 80 bp, synthetic construct; identical to SEQ ID NO: 13333
  source 1..80: mol_type = other DNA

SEQ ID NO: 71849 - DNA, 80 bp, synthetic construct; identical to SEQ ID NO: 37814
  source 1..80: mol_type = other DNA

SEQ ID NO: 71850 - DNA, 80 bp, synthetic construct; identical to SEQ ID NO: 37815
  source 1..80: mol_type = other DNA

SEQ ID NO: 71851 - DNA, 80 bp, synthetic construct; identical to SEQ ID NO: 13334
  source 1..80: mol_type = other DNA

SEQ ID NO: 71852 - DNA, 80 bp, synthetic construct; identical to SEQ ID NO: 37818
  source 1..80: mol_type = other DNA

SEQ ID NO: 71853 - DNA, 80 bp, synthetic construct; identical to SEQ ID NO: 37819
  source 1..80: mol_type = other DNA

SEQ ID NO: 71854 - DNA, 80 bp, synthetic construct; identical to SEQ ID NO: 37820
  source 1..80: mol_type = other DNA

SEQ ID NO: 71855 - DNA, 80 bp, synthetic construct; identical to SEQ ID NO: 13335
  source 1..80: mol_type = other DNA

SEQ ID NO: 71856 - DNA, 80 bp, synthetic construct; identical to SEQ ID NO: 37822
  source 1..80: mol_type = other DNA

SEQ ID NO: 71857 - DNA, 80 bp, synthetic construct; identical to SEQ ID NO: 37823
  source 1..80: mol_type = other DNA

SEQ ID NO: 71858 - DNA, 80 bp, synthetic construct; identical to SEQ ID NO: 13336
  source 1..80: mol_type = other DNA

SEQ ID NO: 71859 - DNA, 80 bp, synthetic construct; identical to SEQ ID NO: 37825
  source 1..80: mol_type = other DNA

SEQ ID NO: 71860 - DNA, 80 bp, synthetic construct; identical to SEQ ID NO: 37826
  source 1..80: mol_type = other DNA

SEQ ID NO: 71861 - DNA, 80 bp, synthetic construct; identical to SEQ ID NO: 37827
  source 1..80: mol_type = other DNA

SEQ ID NO: 71862 - DNA, 80 bp, synthetic construct; identical to SEQ ID NO: 13337
  source 1..80: mol_type = other DNA

SEQ ID NO: 71863 - DNA, 80 bp, synthetic construct; identical to SEQ ID NO: 37829
  source 1..80: mol_type = other DNA

SEQ ID NO: 71864 - DNA, 80 bp, synthetic construct; identical to SEQ ID NO: 37830
  source 1..80: mol_type = other DNA

SEQ ID NO: 71865 - DNA, 80 bp, synthetic construct; identical to SEQ ID NO: 37831
  source 1..80: mol_type = other DNA

SEQ ID NO: 71866 - DNA, 80 bp, synthetic construct; identical to SEQ ID NO: 13338
  source 1..80: mol_type = other DNA

SEQ ID NO: 71867 - DNA, 80 bp, synthetic construct; identical to SEQ ID NO: 37833
  source 1..80: mol_type = other DNA

SEQ ID NO: 71868 - DNA, 80 bp, synthetic construct; identical to SEQ ID NO: 37834
  source 1..80: mol_type = other DNA

SEQ ID NO: 71869 - DNA, 80 bp, synthetic construct; identical to SEQ ID NO: 13339
  source 1..80: mol_type = other DNA

SEQ ID NO: 71870 - DNA, 80 bp, synthetic construct; identical to SEQ ID NO: 37836
  source 1..80: mol_type = other DNA

SEQ ID NO: 71871 - DNA, 80 bp, synthetic construct; identical to SEQ ID NO: 37837
  source 1..80: mol_type = other DNA

SEQ ID NO: 71872 - DNA, 80 bp, synthetic construct; identical to SEQ ID NO: 37838
  source 1..80: mol_type = other DNA

SEQ ID NO: 71873 - DNA, 80 bp, synthetic construct; identical to SEQ ID NO: 13340
  source 1..80: mol_type = other DNA

SEQ ID NO: 71874 - DNA, 80 bp, synthetic construct; identical to SEQ ID NO: 37840
  source 1..80: mol_type = other DNA

SEQ ID NO: 71875 - DNA, 80 bp, synthetic construct; identical to SEQ ID NO: 37841
  source 1..80: mol_type = other DNA

SEQ ID NO: 71876 - DNA, 80 bp, synthetic construct; identical to SEQ ID NO: 13341
  source 1..80: mol_type = other DNA

SEQ ID NO: 71877 - DNA, 80 bp, synthetic construct; identical to SEQ ID NO: 37843
  source 1..80: mol_type = other DNA

SEQ ID NO: 71878 - DNA, 80 bp, synthetic construct; identical to SEQ ID NO: 37844
  source 1..80: mol_type = other DNA

SEQ ID NO: 71879 - DNA, 80 bp, synthetic construct; identical to SEQ ID NO: 37845
  source 1..80: mol_type = other DNA

SEQ ID NO: 71880 - DNA, 80 bp, synthetic construct; identical to SEQ ID NO: 13342
  source 1..80: mol_type = other DNA

SEQ ID NO: 71881 - DNA, 80 bp, synthetic construct; identical to SEQ ID NO: 37847
  source 1..80: mol_type = other DNA

SEQ ID NO: 71882 - DNA, 80 bp, synthetic construct; identical to SEQ ID NO: 37848
  source 1..80: mol_type = other DNA

SEQ ID NO: 71883 - DNA, 80 bp, synthetic construct; identical to SEQ ID NO: 37849
  source 1..80: mol_type = other DNA

SEQ ID NO: 71884 - DNA, 80 bp, synthetic construct; identical to SEQ ID NO: 13343
  source 1..80: mol_type = other DNA

SEQ ID NO: 71885 - DNA, 80 bp, synthetic construct; identical to SEQ ID NO: 37852
  source 1..80: mol_type = other DNA

SEQ ID NO: 71886 - DNA, 80 bp, synthetic construct; identical to SEQ ID NO: 13344
  source 1..80: mol_type = other DNA

SEQ ID NO: 71887 - DNA, 80 bp, synthetic construct; identical to SEQ ID NO: 37856
  source 1..80: mol_type = other DNA

SEQ ID NO: 71888 - DNA, 80 bp, synthetic construct; identical to SEQ ID NO: 37857
  source 1..80: mol_type = other DNA

SEQ ID NO: 71889 - DNA, 80 bp, synthetic construct; identical to SEQ ID NO: 13345
  source 1..80: mol_type = other DNA

SEQ ID NO: 71890 - DNA, 80 bp, synthetic construct; identical to SEQ ID NO: 37859
  source 1..80: mol_type = other DNA

SEQ ID NO: 71891 - DNA, 80 bp, synthetic construct; identical to SEQ ID NO: 37860
  source 1..80: mol_type = other DNA

SEQ ID NO: 71892 - DNA, 80 bp, synthetic construct; identical to SEQ ID NO: 37862
  source 1..80: mol_type = other DNA

SEQ ID NO: 71893 - DNA, 80 bp, synthetic construct; identical to SEQ ID NO: 13346
  source 1..80: mol_type = other DNA

SEQ ID NO: 71894 - DNA, 80 bp, synthetic construct; identical to SEQ ID NO: 37864
  source 1..80: mol_type = other DNA

SEQ ID NO: 71895 - DNA, 80 bp, synthetic construct; identical to SEQ ID NO: 37865
  source 1..80: mol_type = other DNA

SEQ ID NO: 71896 - DNA, 80 bp, synthetic construct; identical to SEQ ID NO: 37866
  source 1..80: mol_type = other DNA

SEQ ID NO: 71897 - DNA, 80 bp, synthetic construct; identical to SEQ ID NO: 13347
  source 1..80: mol_type = other DNA

SEQ ID NO: 71898 - DNA, 80 bp, synthetic construct; identical to SEQ ID NO: 37869
  source 1..80: mol_type = other DNA

SEQ ID NO: 71899 - DNA, 80 bp, synthetic construct; identical to SEQ ID NO: 37870
  source 1..80: mol_type = other DNA

SEQ ID NO: 71900 - DNA, 80 bp, synthetic construct; identical to SEQ ID NO: 13348
  source 1..80: mol_type = other DNA

SEQ ID NO: 71901 - DNA, 80 bp, synthetic construct; identical to SEQ ID NO: 37872
  source 1..80: mol_type = other DNA

SEQ ID NO: 71902 - DNA, 80 bp, synthetic construct; identical to SEQ ID NO: 37873
  source 1..80: mol_type = other DNA

SEQ ID NO: 71903 - DNA, 80 bp, synthetic construct; identical to SEQ ID NO: 37874
  source 1..80: mol_type = other DNA

SEQ ID NO: 71904 - DNA, 80 bp, synthetic construct; identical to SEQ ID NO: 13349
  source 1..80: mol_type = other DNA

SEQ ID NO: 71905 - DNA, 80 bp, synthetic construct; identical to SEQ ID NO: 37877
  source 1..80: mol_type = other DNA

SEQ ID NO: 71906 - DNA, 80 bp, synthetic construct; identical to SEQ ID NO: 37878
  source 1..80: mol_type = other DNA

SEQ ID NO: 71907 - DNA, 80 bp, synthetic construct; identical to SEQ ID NO: 13350
  source 1..80: mol_type = other DNA

SEQ ID NO: 71908 - DNA, 80 bp, synthetic construct; identical to SEQ ID NO: 37880
  source 1..80: mol_type = other DNA

SEQ ID NO: 71909 - DNA, 80 bp, synthetic construct; identical to SEQ ID NO: 37881
  source 1..80: mol_type = other DNA

SEQ ID NO: 71910 - DNA, 80 bp, synthetic construct; identical to SEQ ID NO: 13351
  source 1..80: mol_type = other DNA

SEQ ID NO: 71911 - DNA, 80 bp, synthetic construct; identical to SEQ ID NO: 37883
  source 1..80: mol_type = other DNA

SEQ ID NO: 71912 - DNA, 80 bp, synthetic construct; identical to SEQ ID NO: 37885
  source 1..80: mol_type = other DNA

SEQ ID NO: 71913 - DNA, 80 bp, synthetic construct; identical to SEQ ID NO: 37886
  source 1..80: mol_type = other DNA

SEQ ID NO: 71914 - DNA, 80 bp, synthetic construct; identical to SEQ ID NO: 13352
  source 1..80: mol_type = other DNA

SEQ ID NO: 71915 - DNA, 80 bp, synthetic construct; identical to SEQ ID NO: 37888
  source 1..80: mol_type = other DNA

SEQ ID NO: 71916 - DNA, 80 bp, synthetic construct; identical to SEQ ID NO: 13353
  source 1..80: mol_type = other DNA

SEQ ID NO: 71917 - DNA, 80 bp, synthetic construct; identical to SEQ ID NO: 37891
  source 1..80: mol_type = other DNA

SEQ ID NO: 71918 - DNA, 80 bp, synthetic construct; identical to SEQ ID NO: 37892
  source 1..80: mol_type = other DNA

SEQ ID NO: 71919 - DNA, 80 bp, synthetic construct; identical to SEQ ID NO: 37894
  source 1..80: mol_type = other DNA

SEQ ID NO: 71920 - DNA, 80 bp, synthetic construct; identical to SEQ ID NO: 13354
  source 1..80: mol_type = other DNA

SEQ ID NO: 71921 - DNA, 80 bp, synthetic construct; identical to SEQ ID NO: 37896
  source 1..80: mol_type = other DNA

SEQ ID NO: 71922 - DNA, 80 bp, synthetic construct; identical to SEQ ID NO: 13355
  source 1..80: mol_type = other DNA

SEQ ID NO: 71923 - DNA, 80 bp, synthetic construct; identical to SEQ ID NO: 37900
  source 1..80: mol_type = other DNA

SEQ ID NO: 71924 - DNA, 80 bp, synthetic construct; identical to SEQ ID NO: 37901
  source 1..80: mol_type = other DNA

SEQ ID NO: 71925 - DNA, 80 bp, synthetic construct; identical to SEQ ID NO: 13356
  source 1..80: mol_type = other DNA

SEQ ID NO: 71926 - DNA, 80 bp, synthetic construct; identical to SEQ ID NO: 37903
  source 1..80: mol_type = other DNA

SEQ ID NO: 71927 - DNA, 80 bp, synthetic construct; identical to SEQ ID NO: 37904
  source 1..80: mol_type = other DNA

SEQ ID NO: 71928 - DNA, 80 bp, synthetic construct; identical to SEQ ID NO: 13357
  source 1..80: mol_type = other DNA

SEQ ID NO: 71929 - DNA, 80 bp, synthetic construct; identical to SEQ ID NO: 37907
  source 1..80: mol_type = other DNA

SEQ ID NO: 71930 - DNA, 80 bp, synthetic construct; identical to SEQ ID NO: 13358
  source 1..80: mol_type = other DNA

SEQ ID NO: 71931 - DNA, 80 bp, synthetic construct; identical to SEQ ID NO: 37911
  source 1..80: mol_type = other DNA

SEQ ID NO: 71932 - DNA, 80 bp, synthetic construct; identical to SEQ ID NO: 37912
  source 1..80: mol_type = other DNA

SEQ ID NO: 71933 - DNA, 80 bp, synthetic construct; identical to SEQ ID NO: 13359
  source 1..80: mol_type = other DNA

SEQ ID NO: 71934 - DNA, 80 bp, synthetic construct; identical to SEQ ID NO: 37915
  source 1..80: mol_type = other DNA

SEQ ID NO: 71935 - DNA, 80 bp, synthetic construct; identical to SEQ ID NO: 37916
  source 1..80: mol_type = other DNA

SEQ ID NO: 71936 - DNA, 80 bp, synthetic construct; identical to SEQ ID NO: 37917
  source 1..80: mol_type = other DNA

SEQ ID NO: 71937 - DNA, 80 bp, synthetic construct; identical to SEQ ID NO: 13360
  source 1..80: mol_type = other DNA

SEQ ID NO: 71938 - DNA, 80 bp, synthetic construct; identical to SEQ ID NO: 37920
  source 1..80: mol_type = other DNA

SEQ ID NO: 71939 - DNA, 80 bp, synthetic construct; identical to SEQ ID NO: 37921
  source 1..80: mol_type = other DNA

SEQ ID NO: 71940 - DNA, 80 bp, synthetic construct; identical to SEQ ID NO: 13361
  source 1..80: mol_type = other DNA

SEQ ID NO: 71941 - DNA, 80 bp, synthetic construct; identical to SEQ ID NO: 37923
  source 1..80: mol_type = other DNA

SEQ ID NO: 71942 - DNA, 80 bp, synthetic construct; identical to SEQ ID NO: 37924
  source 1..80: mol_type = other DNA

SEQ ID NO: 71943 - DNA, 80 bp, synthetic construct; identical to SEQ ID NO: 37925
  source 1..80: mol_type = other DNA

SEQ ID NO: 71944 - DNA, 80 bp, synthetic construct; identical to SEQ ID NO: 13362
  source 1..80: mol_type = other DNA

SEQ ID NO: 71945 - DNA, 80 bp, synthetic construct; identical to SEQ ID NO: 37927
  source 1..80: mol_type = other DNA

SEQ ID NO: 71946 - DNA, 80 bp, synthetic construct; identical to SEQ ID NO: 37928
  source 1..80: mol_type = other DNA

SEQ ID NO: 71947 - DNA, 80 bp, synthetic construct; identical to SEQ ID NO: 37929
  source 1..80: mol_type = other DNA

SEQ ID NO: 71948 - DNA, 80 bp, synthetic construct; identical to SEQ ID NO: 37930
  source 1..80: mol_type = other DNA

SEQ ID NO: 71949 - DNA, 80 bp, synthetic construct; identical to SEQ ID NO: 13363
  source 1..80: mol_type = other DNA

SEQ ID NO: 71950 - DNA, 80 bp, synthetic construct; identical to SEQ ID NO: 37932
  source 1..80: mol_type = other DNA

SEQ ID NO: 71951 - DNA, 80 bp, synthetic construct; identical to SEQ ID NO: 37933
  source 1..80: mol_type = other DNA

SEQ ID NO: 71952 - DNA, 80 bp, synthetic construct; identical to SEQ ID NO: 37934
  source 1..80: mol_type = other DNA

SEQ ID NO: 71953 - DNA, 80 bp, synthetic construct; identical to SEQ ID NO: 37935
  source 1..80: mol_type = other DNA

SEQ ID NO: 71954 - DNA, 80 bp, synthetic construct; identical to SEQ ID NO: 13364
  source 1..80: mol_type = other DNA

SEQ ID NO: 71955 - DNA, 80 bp, synthetic construct; identical to SEQ ID NO: 37937
  source 1..80: mol_type = other DNA

SEQ ID NO: 71956 - DNA, 80 bp, synthetic construct; identical to SEQ ID NO: 37938
  source 1..80: mol_type = other DNA

SEQ ID NO: 71957 - DNA, 80 bp, synthetic construct; identical to SEQ ID NO: 13365
  source 1..80: mol_type = other DNA

SEQ ID NO: 71958 - DNA, 80 bp, synthetic construct; identical to SEQ ID NO: 37940
  source 1..80: mol_type = other DNA

SEQ ID NO: 71959 - DNA, 80 bp, synthetic construct; identical to SEQ ID NO: 37941
  source 1..80: mol_type = other DNA

SEQ ID NO: 71960 - DNA, 80 bp, synthetic construct; identical to SEQ ID NO: 37942
  source 1..80: mol_type = other DNA

SEQ ID NO: 71961 - DNA, 80 bp, synthetic construct; identical to SEQ ID NO: 13366
  source 1..80: mol_type = other DNA

SEQ ID NO: 71962 - DNA, 80 bp, synthetic construct; identical to SEQ ID NO: 37944
  source 1..80: mol_type = other DNA

SEQ ID NO: 71963 - DNA, 80 bp, synthetic construct; identical to SEQ ID NO: 37945
  source 1..80: mol_type = other DNA

SEQ ID NO: 71964 - DNA, 80 bp, synthetic construct; identical to SEQ ID NO: 37946
  source 1..80: mol_type = other DNA

SEQ ID NO: 71965 - DNA, 80 bp, synthetic construct; identical to SEQ ID NO: 13367
  source 1..80: mol_type = other DNA

SEQ ID NO: 71966 - DNA, 80 bp, synthetic construct; identical to SEQ ID NO: 37948
  source 1..80: mol_type = other DNA

SEQ ID NO: 71967 - DNA, 80 bp, synthetic construct; identical to SEQ ID NO: 37949
  source 1..80: mol_type = other DNA

SEQ ID NO: 71968 - DNA, 80 bp, synthetic construct; identical to SEQ ID NO: 37950
  source 1..80: mol_type = other DNA

SEQ ID NO: 71969 - DNA, 80 bp, synthetic construct; identical to SEQ ID NO: 37951
  source 1..80: mol_type = other DNA

SEQ ID NO: 71970 - DNA, 80 bp, synthetic construct; identical to SEQ ID NO: 13368
  source 1..80: mol_type = other DNA

SEQ ID NO: 71971 - DNA, 80 bp, synthetic construct; identical to SEQ ID NO: 37953
  source 1..80: mol_type = other DNA

SEQ ID NO: 71972 - DNA, 80 bp, synthetic construct; identical to SEQ ID NO: 37954
  source 1..80: mol_type = other DNA

SEQ ID NO: 71973 - DNA, 80 bp, synthetic construct; identical to SEQ ID NO: 37955
  source 1..80: mol_type = other DNA

SEQ ID NO: 71974 - DNA, 80 bp, synthetic construct; identical to SEQ ID NO: 13369
  source 1..80: mol_type = other DNA

SEQ ID NO: 71975 - DNA, 80 bp, synthetic construct; identical to SEQ ID NO: 37957
  source 1..80: mol_type = other DNA

SEQ ID NO: 71976 - DNA, 80 bp, synthetic construct; identical to SEQ ID NO: 37958
  source 1..80: mol_type = other DNA

SEQ ID NO: 71977 - DNA, 80 bp, synthetic construct; identical to SEQ ID NO: 37959
  source 1..80: mol_type = other DNA

SEQ ID NO: 71978 - DNA, 80 bp, synthetic construct; identical to SEQ ID NO: 13370
  source 1..80: mol_type = other DNA

SEQ ID NO: 71979 - DNA, 80 bp, synthetic construct; identical to SEQ ID NO: 37961
  source 1..80: mol_type = other DNA

SEQ ID NO: 71980 - DNA, 80 bp, synthetic construct; identical to SEQ ID NO: 37962
  source 1..80: mol_type = other DNA

SEQ ID NO: 71981 - DNA, 80 bp, synthetic construct; identical to SEQ ID NO: 13371
  source 1..80: mol_type = other DNA

SEQ ID NO: 71982 - DNA, 80 bp, synthetic construct; identical to SEQ ID NO: 37964
  source 1..80: mol_type = other DNA

SEQ ID NO: 71983 - DNA, 80 bp, synthetic construct; identical to SEQ ID NO: 37965
  source 1..80: mol_type = other DNA

SEQ ID NO: 71984 - DNA, 80 bp, synthetic construct; identical to SEQ ID NO: 37966
  source 1..80: mol_type = other DNA

SEQ ID NO: 71985 - DNA, 80 bp, synthetic construct; identical to SEQ ID NO: 13372
  source 1..80: mol_type = other DNA

SEQ ID NO: 71986 - DNA, 80 bp, synthetic construct; identical to SEQ ID NO: 37968
  source 1..80: mol_type = other DNA

SEQ ID NO: 71987 - DNA, 80 bp, synthetic construct; identical to SEQ ID NO: 37969
  source 1..80: mol_type = other DNA

SEQ ID NO: 71988 - DNA, 80 bp, synthetic construct; identical to SEQ ID NO: 37970
  source 1..80: mol_type = other DNA

SEQ ID NO: 71989 - DNA, 80 bp, synthetic construct; identical to SEQ ID NO: 13373
  source 1..80: mol_type = other DNA

SEQ ID NO: 71990 - DNA, 80 bp, synthetic construct; identical to SEQ ID NO: 37972
  source 1..80: mol_type = other DNA

SEQ ID NO: 71991 - DNA, 80 bp, synthetic construct; identical to SEQ ID NO: 37973
  source 1..80: mol_type = other DNA

SEQ ID NO: 71992 - DNA, 80 bp, synthetic construct; identical to SEQ ID NO: 37974
  source 1..80: mol_type = other DNA

SEQ ID NO: 71993 - DNA, 80 bp, synthetic construct; identical to SEQ ID NO: 37975
  source 1..80: mol_type = other DNA

SEQ ID NO: 71994 - DNA, 80 bp, synthetic construct; identical to SEQ ID NO: 13374
  source 1..80: mol_type = other DNA

SEQ ID NO: 71995 - DNA, 80 bp, synthetic construct; identical to SEQ ID NO: 37977
  source 1..80: mol_type = other DNA

SEQ ID NO: 71996 - DNA, 80 bp, synthetic construct; identical to SEQ ID NO: 37978
  source 1..80: mol_type = other DNA

SEQ ID NO: 71997 - DNA, 80 bp, synthetic construct; identical to SEQ ID NO: 13375
  source 1..80: mol_type = other DNA

SEQ ID NO: 71998 - DNA, 80 bp, synthetic construct; identical to SEQ ID NO: 37980
  source 1..80: mol_type = other DNA

SEQ ID NO: 71999 - DNA, 80 bp, synthetic construct; identical to SEQ ID NO: 37981
  source 1..80: mol_type = other DNA

SEQ ID NO: 72000 - DNA, 80 bp, synthetic construct; identical to SEQ ID NO: 37982
  source 1..80: mol_type = other DNA

SEQ ID NO: 72001 - DNA, 80 bp, synthetic construct; identical to SEQ ID NO: 37983
  source 1..80: mol_type = other DNA

SEQ ID NO: 72002 - DNA, 80 bp, synthetic construct; identical to SEQ ID NO: 13376
  source 1..80: mol_type = other DNA

SEQ ID NO: 72003 - DNA, 80 bp, synthetic construct; identical to SEQ ID NO: 37985
  source 1..80: mol_type = other DNA

SEQ ID NO: 72004 - DNA, 80 bp, synthetic construct; identical to SEQ ID NO: 37986
  source 1..80: mol_type = other DNA

SEQ ID NO: 72005 - DNA, 80 bp, synthetic construct; identical to SEQ ID NO: 13377
  source 1..80: mol_type = other DNA

SEQ ID NO: 72006 - DNA, 80 bp, synthetic construct; identical to SEQ ID NO: 37988
  source 1..80: mol_type = other DNA

SEQ ID NO: 72007 - DNA, 80 bp, synthetic construct; identical to SEQ ID NO: 37989
  source 1..80: mol_type = other DNA

SEQ ID NO: 72008 - DNA, 80 bp, synthetic construct; identical to SEQ ID NO: 37990
  source 1..80: mol_type = other DNA

SEQ ID NO: 72009 - DNA, 80 bp, synthetic construct; identical to SEQ ID NO: 37991
  source 1..80: mol_type = other DNA

SEQ ID NO: 72010 - DNA, 80 bp, synthetic construct; identical to SEQ ID NO: 13378
  source 1..80: mol_type = other DNA

SEQ ID NO: 72011 - DNA, 80 bp, synthetic construct; identical to SEQ ID NO: 37993
  source 1..80: mol_type = other DNA

SEQ ID NO: 72012 - DNA, 80 bp, synthetic construct; identical to SEQ ID NO: 37994
  source 1..80: mol_type = other DNA

SEQ ID NO: 72013 - DNA, 80 bp, synthetic construct; identical to SEQ ID NO: 13379
  source 1..80: mol_type = other DNA

SEQ ID NO: 72014 - DNA, 80 bp, synthetic construct; identical to SEQ ID NO: 37996
  source 1..80: mol_type = other DNA

SEQ ID NO: 72015 - DNA, 80 bp, synthetic construct; identical to SEQ ID NO: 37997
  source 1..80: mol_type = other DNA

SEQ ID NO: 72016 - DNA, 80 bp, synthetic construct; identical to SEQ ID NO: 37998
  source 1..80: mol_type = other DNA

SEQ ID NO: 72017 - DNA, 80 bp, synthetic construct; identical to SEQ ID NO: 37999
  source 1..80: mol_type = other DNA

SEQ ID NO: 72018 - DNA, 80 bp, synthetic construct; identical to SEQ ID NO: 13380
  source 1..80: mol_type = other DNA

SEQ ID NO: 72019 - DNA, 80 bp, synthetic construct; identical to SEQ ID NO: 38001
  source 1..80: mol_type = other DNA

SEQ ID NO: 72020 - DNA, 80 bp, synthetic construct; identical to SEQ ID NO: 38002
  source 1..80: mol_type = other DNA

SEQ ID NO: 72021 - DNA, 80 bp, synthetic construct; identical to SEQ ID NO: 38003
  source 1..80: mol_type = other DNA

SEQ ID NO: 72022 - DNA, 80 bp, synthetic construct; identical to SEQ ID NO: 13381
  source 1..80: mol_type = other DNA

SEQ ID NO: 72023 - DNA, 80 bp, synthetic construct; identical to SEQ ID NO: 38005
  source 1..80: mol_type = other DNA

SEQ ID NO: 72024 - DNA, 80 bp, synthetic construct; identical to SEQ ID NO: 38006
  source 1..80: mol_type = other DNA

SEQ ID NO: 72025 - DNA, 80 bp, synthetic construct; identical to SEQ ID NO: 13382
  source 1..80: mol_type = other DNA

SEQ ID NO: 72026 - DNA, 80 bp, synthetic construct; identical to SEQ ID NO: 38008
  source 1..80: mol_type = other DNA

SEQ ID NO: 72027 - DNA, 80 bp, synthetic construct; identical to SEQ ID NO: 38009
  source 1..80: mol_type = other DNA

SEQ ID NO: 72028 - DNA, 80 bp, synthetic construct; identical to SEQ ID NO: 38010
  source 1..80: mol_type = other DNA

SEQ ID NO: 72029 - DNA, 80 bp, synthetic construct; identical to SEQ ID NO: 13383
  source 1..80: mol_type = other DNA

SEQ ID NO: 72030 - DNA, 80 bp, synthetic construct; identical to SEQ ID NO: 38012
  source 1..80: mol_type = other DNA

SEQ ID NO: 72031 - DNA, 80 bp, synthetic construct; identical to SEQ ID NO: 38013
  source 1..80: mol_type = other DNA

SEQ ID NO: 72032 - DNA, 80 bp, synthetic construct; identical to SEQ ID NO: 38014
  source 1..80: mol_type = other DNA

SEQ ID NO: 72033 - DNA, 80 bp, synthetic construct; identical to SEQ ID NO: 13384
  source 1..80: mol_type = other DNA

SEQ ID NO: 72034 - DNA, 80 bp, synthetic construct; identical to SEQ ID NO: 38016
  source 1..80: mol_type = other DNA

SEQ ID NO: 72035 - DNA, 80 bp, synthetic construct; identical to SEQ ID NO: 38017
  source 1..80: mol_type = other DNA

SEQ ID NO: 72036 - DNA, 80 bp, synthetic construct; identical to SEQ ID NO: 38018
  source 1..80: mol_type = other DNA

SEQ ID NO: 72037 - DNA, 80 bp, synthetic construct; identical to SEQ ID NO: 13385
  source 1..80: mol_type = other DNA

SEQ ID NO: 72038 - DNA, 80 bp, synthetic construct; identical to SEQ ID NO: 38020
  source 1..80: mol_type = other DNA

SEQ ID NO: 72039 - DNA, 80 bp, synthetic construct; identical to SEQ ID NO: 38021
  source 1..80: mol_type = other DNA

SEQ ID NO: 72040 - DNA, 80 bp, synthetic construct; identical to SEQ ID NO: 38022
  source 1..80: mol_type = other DNA

SEQ ID NO: 72041 - DNA, 80 bp, synthetic construct; identical to SEQ ID NO: 38023
  source 1..80: mol_type = other DNA

SEQ ID NO: 72042 - DNA, 80 bp, synthetic construct; identical to SEQ ID NO: 13386
  source 1..80: mol_type = other DNA

SEQ ID NO: 72043 - DNA, 80 bp, synthetic construct; identical to SEQ ID NO: 38026
  source 1..80: mol_type = other DNA

SEQ ID NO: 72044 - DNA, 80 bp, synthetic construct; identical to SEQ ID NO: 13387
  source 1..80: mol_type = other DNA

SEQ ID NO: 72045 - DNA, 80 bp, synthetic construct; identical to SEQ ID NO: 38029
  source 1..80: mol_type = other DNA

SEQ ID NO: 72046 - DNA, 80 bp, synthetic construct; identical to SEQ ID NO: 38030
  source 1..80: mol_type = other DNA

SEQ ID NO: 72047 - DNA, 80 bp, synthetic construct; identical to SEQ ID NO: 38031
  source 1..80: mol_type = other DNA

SEQ ID NO: 72048 - DNA, 80 bp, synthetic construct; identical to SEQ ID NO: 13388
  source 1..80: mol_type = other DNA

SEQ ID NO: 72049 - DNA, 80 bp, synthetic construct; identical to SEQ ID NO: 38033
  source 1..80: mol_type = other DNA

SEQ ID NO: 72050 - DNA, 80 bp, synthetic construct; identical to SEQ ID NO: 38034
  source 1..80: mol_type = other DNA

SEQ ID NO: 72051 - DNA, 80 bp, synthetic construct; identical to SEQ ID NO: 13389
  source 1..80: mol_type = other DNA

SEQ ID NO: 72052 - DNA, 80 bp, synthetic construct; identical to SEQ ID NO: 38036
  source 1..80: mol_type = other DNA

SEQ ID NO: 72053 - DNA, 80 bp, synthetic construct; identical to SEQ ID NO: 38037
  source 1..80: mol_type = other DNA

SEQ ID NO: 72054 - DNA, 80 bp, synthetic construct; identical to SEQ ID NO: 38038
  source 1..80: mol_type = other DNA

SEQ ID NO: 72055 - DNA, 80 bp, synthetic construct; identical to SEQ ID NO: 13390
  source 1..80: mol_type = other DNA

SEQ ID NO: 72056 - DNA, 80 bp, synthetic construct; identical to SEQ ID NO: 38040
  source 1..80: mol_type = other DNA

SEQ ID NO: 72057 - DNA, 80 bp, synthetic construct; identical to SEQ ID NO: 38041
  source 1..80: mol_type = other DNA

SEQ ID NO: 72058 - DNA, 80 bp, synthetic construct; identical to SEQ ID NO: 38042
  source 1..80: mol_type = other DNA

SEQ ID NO: 72059 - DNA, 80 bp, synthetic construct; identical to SEQ ID NO: 38043
  source 1..80: mol_type = other DNA

SEQ ID NO: 72060 - DNA, 80 bp, synthetic construct; identical to SEQ ID NO: 13391
  source 1..80: mol_type = other DNA

SEQ ID NO: 72061 - DNA, 80 bp, synthetic construct; identical to SEQ ID NO: 38045
  source 1..80: mol_type = other DNA

SEQ ID NO: 72062 - DNA, 80 bp, synthetic construct; identical to SEQ ID NO: 38046
  source 1..80: mol_type = other DNA

SEQ ID NO: 72063 - DNA, 80 bp, synthetic construct; identical to SEQ ID NO: 13392
  source 1..80: mol_type = other DNA

SEQ ID NO: 72064 - DNA, 80 bp, synthetic construct; identical to SEQ ID NO: 38048
  source 1..80: mol_type = other DNA

SEQ ID NO: 72065 - DNA, 80 bp, synthetic construct; identical to SEQ ID NO: 38049
  source 1..80: mol_type = other DNA

SEQ ID NO: 72066 - DNA, 80 bp, synthetic construct; identical to SEQ ID NO: 38050
  source 1..80: mol_type = other DNA

SEQ ID NO: 72067 - DNA, 80 bp, synthetic construct; identical to SEQ ID NO: 38051
  source 1..80: mol_type = other DNA

SEQ ID NO: 72068 - DNA, 80 bp, synthetic construct; identical to SEQ ID NO: 13393
  source 1..80: mol_type = other DNA

SEQ ID NO: 72069 - DNA, 80 bp, synthetic construct; identical to SEQ ID NO: 38053
  source 1..80: mol_type = other DNA

SEQ ID NO: 72070 - DNA, 80 bp, synthetic construct; identical to SEQ ID NO: 38054
  source 1..80: mol_type = other DNA

SEQ ID NO: 72071 - DNA, 80 bp, synthetic construct; identical to SEQ ID NO: 13394
  source 1..80: mol_type = other DNA

SEQ ID NO: 72072 - DNA, 80 bp, synthetic construct; identical to SEQ ID NO: 38056
  source 1..80: mol_type = other DNA

SEQ ID NO: 72073 - DNA, 80 bp, synthetic construct; identical to SEQ ID NO: 38057
  source 1..80: mol_type = other DNA

SEQ ID NO: 72074 - DNA, 80 bp, synthetic construct; identical to SEQ ID NO: 38058
  source 1..80: mol_type = other DNA

SEQ ID NO: 72075 - DNA, 80 bp, synthetic construct; identical to SEQ ID NO: 38059
  source 1..80: mol_type = other DNA

SEQ ID NO: 72076 - DNA, 80 bp, synthetic construct; identical to SEQ ID NO: 13395
  source 1..80: mol_type = other DNA

SEQ ID NO: 72077 - DNA, 80 bp, synthetic construct; identical to SEQ ID NO: 38061
  source 1..80: mol_type = other DNA

SEQ ID NO: 72078 - DNA, 80 bp, synthetic construct; identical to SEQ ID NO: 38062
  source 1..80: mol_type = other DNA

SEQ ID NO: 72079 - DNA, 80 bp, synthetic construct; identical to SEQ ID NO: 38063
  source 1..80: mol_type = other DNA

SEQ ID NO: 72080 - DNA, 80 bp, synthetic construct; identical to SEQ ID NO: 13396
  source 1..80: mol_type = other DNA

SEQ ID NO: 72081 - DNA, 80 bp, synthetic construct; identical to SEQ ID NO: 38065
  source 1..80: mol_type = other DNA

SEQ ID NO: 72082 - DNA, 80 bp, synthetic construct; identical to SEQ ID NO: 38066
  source 1..80: mol_type = other DNA

SEQ ID NO: 72083 - DNA, 80 bp, synthetic construct; identical to SEQ ID NO: 38067
  source 1..80: mol_type = other DNA

SEQ ID NO: 72084 - DNA, 80 bp, synthetic construct; identical to SEQ ID NO: 13397
  source 1..80: mol_type = other DNA

SEQ ID NO: 72085 - DNA, 80 bp, synthetic construct; identical to SEQ ID NO: 38069
  source 1..80: mol_type = other DNA

SEQ ID NO: 72086 - DNA, 80 bp, synthetic construct; identical to SEQ ID NO: 38070
  source 1..80: mol_type = other DNA

SEQ ID NO: 72087 - DNA, 80 bp, synthetic construct; identical to SEQ ID NO: 13398
  source 1..80: mol_type = other DNA

SEQ ID NO: 72088 - DNA, 80 bp, synthetic construct; identical to SEQ ID NO: 38072
  source 1..80: mol_type = other DNA

SEQ ID NO: 72089 - DNA, 80 bp, synthetic construct; identical to SEQ ID NO: 38073
  source 1..80: mol_type = other DNA

SEQ ID NO: 72090 - DNA, 80 bp, synthetic construct; identical to SEQ ID NO: 38074
  source 1..80: mol_type = other DNA

SEQ ID NO: 72091 - DNA, 80 bp, synthetic construct; identical to SEQ ID NO: 13399
  source 1..80: mol_type = other DNA

SEQ ID NO: 72092 - DNA, 80 bp, synthetic construct; identical to SEQ ID NO: 38076
  source 1..80: mol_type = other DNA

SEQ ID NO: 72093 - DNA, 80 bp, synthetic construct; identical to SEQ ID NO: 38077
  source 1..80: mol_type = other DNA

SEQ ID NO: 72094 - DNA, 80 bp, synthetic construct; identical to SEQ ID NO: 38078
  source 1..80: mol_type = other DNA

SEQ ID NO: 72095 - DNA, 80 bp, synthetic construct; identical to SEQ ID NO: 38079
  source 1..80: mol_type = other DNA

SEQ ID NO: 72096 - DNA, 80 bp, synthetic construct; identical to SEQ ID NO: 38081
  source 1..80: mol_type = other DNA

SEQ ID NO: 72097 - DNA, 80 bp, synthetic construct; identical to SEQ ID NO: 38082
  source 1..80: mol_type = other DNA

SEQ ID NO: 72098 - DNA, 80 bp, synthetic construct; identical to SEQ ID NO: 38083
  source 1..80: mol_type = other DNA

SEQ ID NO: 72099 - DNA, 80 bp, synthetic construct; identical to SEQ ID NO: 13401
  source 1..80: mol_type = other DNA

SEQ ID NO: 72100 - DNA, 80 bp, synthetic construct; identical to SEQ ID NO: 38086
  source 1..80: mol_type = other DNA

SEQ ID NO: 72101 - DNA, 80 bp, synthetic construct; identical to SEQ ID NO: 13402
  source 1..80: mol_type = other DNA

SEQ ID NO: 72102 - DNA, 80 bp, synthetic construct; identical to SEQ ID NO: 38088
  source 1..80: mol_type = other DNA

SEQ ID NO: 72103 - DNA, 80 bp, synthetic construct; identical to SEQ ID NO: 38090
  source 1..80: mol_type = other DNA

SEQ ID NO: 72104 - DNA, 80 bp, synthetic construct; identical to SEQ ID NO: 13403
  source 1..80: mol_type = other DNA

SEQ ID NO: 72105 - DNA, 80 bp, synthetic construct; identical to SEQ ID NO: 38092
  source 1..80: mol_type = other DNA

SEQ ID NO: 72106 - DNA, 80 bp, synthetic construct; identical to SEQ ID NO: 38093
  source 1..80: mol_type = other DNA

SEQ ID NO: 72107 - DNA, 80 bp, synthetic construct; identical to SEQ ID NO: 38094
  source 1..80: mol_type = other DNA

SEQ ID NO: 72108 - DNA, 80 bp, synthetic construct; identical to SEQ ID NO: 13404
  source 1..80: mol_type = other DNA

SEQ ID NO: 72109 - DNA, 80 bp, synthetic construct; identical to SEQ ID NO: 38097
  source 1..80: mol_type = other DNA

SEQ ID NO: 72110 - DNA, 80 bp, synthetic construct; identical to SEQ ID NO: 38098
  source 1..80: mol_type = other DNA

SEQ ID NO: 72111 - DNA, 80 bp, synthetic construct; identical to SEQ ID NO: 13405
  source 1..80: mol_type = other DNA

SEQ ID NO: 72112 - DNA, 80 bp, synthetic construct; identical to SEQ ID NO: 38101
  source 1..80: mol_type = other DNA

SEQ ID NO: 72113 - DNA, 80 bp, synthetic construct; identical to SEQ ID NO: 38102
  source 1..80: mol_type = other DNA

SEQ ID NO: 72114 - DNA, 80 bp, synthetic construct; identical to SEQ ID NO: 38103
  source 1..80: mol_type = other DNA

SEQ ID NO: 72115 - DNA, 80 bp, synthetic construct; identical to SEQ ID NO: 13406
  source 1..80: mol_type = other DNA

SEQ ID NO: 72116 - DNA, 80 bp, synthetic construct; identical to SEQ ID NO: 38105
  source 1..80: mol_type = other DNA

SEQ ID NO: 72117 - DNA, 80 bp, synthetic construct; identical to SEQ ID NO: 38106
  source 1..80: mol_type = other DNA

SEQ ID NO: 72118 - DNA, 80 bp, synthetic construct; identical to SEQ ID NO: 38107
  source 1..80: mol_type = other DNA

SEQ ID NO: 72119 - DNA, 80 bp, synthetic construct; identical to SEQ ID NO: 13407
  source 1..80: mol_type = other DNA

SEQ ID NO: 72120 - DNA, 80 bp, synthetic construct; identical to SEQ ID NO: 38110
  source 1..80: mol_type = other DNA

SEQ ID NO: 72121 - DNA, 80 bp, synthetic construct; identical to SEQ ID NO: 13408
  source 1..80: mol_type = other DNA

SEQ ID NO: 72122 - DNA, 80 bp, synthetic construct; identical to SEQ ID NO: 38112
  source 1..80: mol_type = other DNA

SEQ ID NO: 72123 - DNA, 80 bp, synthetic construct; identical to SEQ ID NO: 38113
  source 1..80: mol_type = other DNA

SEQ ID NO: 72124 - DNA, 80 bp, synthetic construct; identical to SEQ ID NO: 38114
  source 1..80: mol_type = other DNA

SEQ ID NO: 72125 - DNA, 80 bp, synthetic construct; identical to SEQ ID NO: 38115
  source 1..80: mol_type = other DNA

SEQ ID NO: 72126 - DNA, 80 bp, synthetic construct; identical to SEQ ID NO: 13409
  source 1..80: mol_type = other DNA

SEQ ID NO: 72127 - DNA, 80 bp, synthetic construct; identical to SEQ ID NO: 38117
  source 1..80: mol_type = other DNA

SEQ ID NO: 72128 - DNA, 80 bp, synthetic construct; identical to SEQ ID NO: 38118
  source 1..80: mol_type = other DNA

SEQ ID NO: 72129 - DNA, 80 bp, synthetic construct; identical to SEQ ID NO: 38119
  source 1..80: mol_type = other DNA

SEQ ID NO: 72130 - DNA, 80 bp, synthetic construct; identical to SEQ ID NO: 13410
  source 1..80: mol_type = other DNA

SEQ ID NO: 72131 - DNA, 80 bp, synthetic construct; identical to SEQ ID NO: 38121
  source 1..80: mol_type = other DNA

SEQ ID NO: 72132 - DNA, 80 bp, synthetic construct; identical to SEQ ID NO: 38122
  source 1..80: mol_type = other DNA

SEQ ID NO: 72133 - DNA, 80 bp, synthetic construct; identical to SEQ ID NO: 38123
  source 1..80: mol_type = other DNA

SEQ ID NO: 72134 - DNA, 80 bp, synthetic construct; identical to SEQ ID NO: 13411
  source 1..80: mol_type = other DNA

SEQ ID NO: 72135 - DNA, 80 bp, synthetic construct; identical to SEQ ID NO: 38125
  source 1..80: mol_type = other DNA

SEQ ID NO: 72136 - DNA, 80 bp, synthetic construct; identical to SEQ ID NO: 38126
  source 1..80: mol_type = other DNA

SEQ ID NO: 72137 - DNA, 80 bp, synthetic construct; identical to SEQ ID NO: 38127
  source 1..80: mol_type = other DNA

SEQ ID NO: 72138 - DNA, 80 bp, synthetic construct; identical to SEQ ID NO: 13412
  source 1..80: mol_type = other DNA

SEQ ID NO: 72139 - DNA, 80 bp, synthetic construct; identical to SEQ ID NO: 38129
  source 1..80: mol_type = other DNA

SEQ ID NO: 72140 - DNA, 80 bp, synthetic construct; identical to SEQ ID NO: 38130
  source 1..80: mol_type = other DNA

SEQ ID NO: 72141 - DNA, 80 bp, synthetic construct; identical to SEQ ID NO: 38131
  source 1..80: mol_type = other DNA

SEQ ID NO: 72142 - DNA, 80 bp, synthetic construct; identical to SEQ ID NO: 13413
  source 1..80: mol_type = other DNA

SEQ ID NO: 72143 - DNA, 80 bp, synthetic construct; identical to SEQ ID NO: 38133
  source 1..80: mol_type = other DNA

SEQ ID NO: 72144 - DNA, 80 bp, synthetic construct; identical to SEQ ID NO: 38134
  source 1..80: mol_type = other DNA

SEQ ID NO: 72145 - DNA, 80 bp, synthetic construct; identical to SEQ ID NO: 13414
  source 1..80: mol_type = other DNA

SEQ ID NO: 72146 - DNA, 80 bp, synthetic construct; identical to SEQ ID NO: 38136
  source 1..80: mol_type = other DNA

SEQ ID NO: 72147 - DNA, 80 bp, synthetic construct; identical to SEQ ID NO: 38137
  source 1..80: mol_type = other DNA

SEQ ID NO: 72148 - DNA, 80 bp, synthetic construct; identical to SEQ ID NO: 38138
  source 1..80: mol_type = other DNA

SEQ ID NO: 72149 - DNA, 80 bp, synthetic construct; identical to SEQ ID NO: 38139
  source 1..80: mol_type = other DNA

SEQ ID NO: 72150 - DNA, 80 bp, synthetic construct; identical to SEQ ID NO: 13415
  source 1..80: mol_type = other DNA

SEQ ID NO: 72151 - DNA, 80 bp, synthetic construct; identical to SEQ ID NO: 38141
  source 1..80: mol_type = other DNA

SEQ ID NO: 72152 - DNA, 80 bp, synthetic construct; identical to SEQ ID NO: 38142
  source 1..80: mol_type = other DNA

SEQ ID NO: 72153 - DNA, 80 bp, synthetic construct; identical to SEQ ID NO: 38143
  source 1..80: mol_type = other DNA

SEQ ID NO: 72154 - DNA, 80 bp, synthetic construct; identical to SEQ ID NO: 13416
  source 1..80: mol_type = other DNA

SEQ ID NO: 72155 - DNA, 80 bp, synthetic construct; identical to SEQ ID NO: 38145
  source 1..80: mol_type = other DNA

SEQ ID NO: 72156 - DNA, 80 bp, synthetic construct; identical to SEQ ID NO: 38146
  source 1..80: mol_type = other DNA

SEQ ID NO: 72157 - DNA, 80 bp, synthetic construct; identical to SEQ ID NO: 13417
  source 1..80: mol_type = other DNA

SEQ ID NO: 72158 - DNA, 80 bp, synthetic construct; identical to SEQ ID NO: 38148
  source 1..80: mol_type = other DNA

SEQ ID NO: 72159 - DNA, 80 bp, synthetic construct; identical to SEQ ID NO: 38149
  source 1..80: mol_type = other DNA

SEQ ID NO: 72160 - DNA, 80 bp, synthetic construct; identical to SEQ ID NO: 38150
  source 1..80: mol_type = other DNA

SEQ ID NO: 72161 - DNA, 80 bp, synthetic construct; identical to SEQ ID NO: 38151
  source 1..80: mol_type = other DNA

SEQ ID NO: 72162 - DNA, 80 bp, synthetic construct; identical to SEQ ID NO: 13418
  source 1..80: mol_type = other DNA

SEQ ID NO: 72163 - DNA, 80 bp, synthetic construct; identical to SEQ ID NO: 38153
  source 1..80: mol_type = other DNA

SEQ ID NO: 72164 - DNA, 80 bp, synthetic construct; identical to SEQ ID NO: 38154
  source 1..80: mol_type = other DNA

SEQ ID NO: 72165 - DNA, 80 bp, synthetic construct; identical to SEQ ID NO: 38155
  source 1..80: mol_type = other DNA

SEQ ID NO: 72166 - DNA, 80 bp, synthetic construct; identical to SEQ ID NO: 13419
  source 1..80: mol_type = other DNA

SEQ ID NO: 72167 - DNA, 80 bp, synthetic construct; identical to SEQ ID NO: 38157
  source 1..80: mol_type = other DNA

SEQ ID NO: 72168 - DNA, 80 bp, synthetic construct; identical to SEQ ID NO: 38158
  source 1..80: mol_type = other DNA

SEQ ID NO: 72169 - DNA, 80 bp, synthetic construct; identical to SEQ ID NO: 38159
  source 1..80: mol_type = other DNA

SEQ ID NO: 72170 - DNA, 80 bp, synthetic construct; identical to SEQ ID NO: 13420
  source 1..80: mol_type = other DNA

SEQ ID NO: 72171 - DNA, 80 bp, synthetic construct; identical to SEQ ID NO: 38161
  source 1..80: mol_type = other DNA

SEQ ID NO: 72172 - DNA, 80 bp, synthetic construct; identical to SEQ ID NO: 38162
  source 1..80: mol_type = other DNA

SEQ ID NO: 72173 - DNA, 80 bp, synthetic construct; identical to SEQ ID NO: 38163
  source 1..80: mol_type = other DNA

SEQ ID NO: 72174 - DNA, 80 bp, synthetic construct; identical to SEQ ID NO: 13421
  source 1..80: mol_type = other DNA

SEQ ID NO: 72175 - DNA, 80 bp, synthetic construct; identical to SEQ ID NO: 38165
  source 1..80: mol_type = other DNA

SEQ ID NO: 72176 - DNA, 80 bp, synthetic construct; identical to SEQ ID NO: 38166
  source 1..80: mol_type = other DNA

SEQ ID NO: 72177 - DNA, 80 bp, synthetic construct; identical to SEQ ID NO: 38167
  source 1..80: mol_type = other DNA

SEQ ID NO: 72178 - DNA, 80 bp, synthetic construct; identical to SEQ ID NO: 13422
  source 1..80: mol_type = other DNA

SEQ ID NO: 72179 - DNA, 80 bp, synthetic construct; identical to SEQ ID NO: 38169
  source 1..80: mol_type = other DNA

SEQ ID NO: 72180 - DNA, 80 bp, synthetic construct; identical to SEQ ID NO: 38170
  source 1..80: mol_type = other DNA

SEQ ID NO: 72181 - DNA, 80 bp, synthetic construct; identical to SEQ ID NO: 13423
  source 1..80: mol_type = other DNA

SEQ ID NO: 72182 - DNA, 80 bp, synthetic construct; identical to SEQ ID NO: 38172
  source 1..80: mol_type = other DNA

SEQ ID NO: 72183 - DNA, 80 bp, synthetic construct; identical to SEQ ID NO: 38173
  source 1..80: mol_type = other DNA

SEQ ID NO: 72184 - DNA, 80 bp, synthetic construct; identical to SEQ ID NO: 38174
  source 1..80: mol_type = other DNA

SEQ ID NO: 72185 - DNA, 80 bp, synthetic construct; identical to SEQ ID NO: 13424
  source 1..80: mol_type = other DNA

SEQ ID NO: 72186 - DNA, 80 bp, synthetic construct; identical to SEQ ID NO: 38176
  source 1..80: mol_type = other DNA

SEQ ID NO: 72187 - DNA, 80 bp, synthetic construct; identical to SEQ ID NO: 38177
  source 1..80: mol_type = other DNA

SEQ ID NO: 72188 - DNA, 80 bp, synthetic construct; identical to SEQ ID NO: 38178
  source 1..80: mol_type = other DNA

SEQ ID NO: 72189 - DNA, 80 bp, synthetic construct; identical to SEQ ID NO: 38179
  source 1..80: mol_type = other DNA

SEQ ID NO: 72190 - DNA, 80 bp, synthetic construct; identical to SEQ ID NO: 13425
  source 1..80: mol_type = other DNA

SEQ ID NO: 72191 - DNA, 80 bp, synthetic construct; identical to SEQ ID NO: 38181
  source 1..80: mol_type = other DNA

SEQ ID NO: 72192 - DNA, 80 bp, synthetic construct; identical to SEQ ID NO: 38182
  source 1..80: mol_type = other DNA

SEQ ID NO: 72193 - DNA, 80 bp, synthetic construct; identical to SEQ ID NO: 13426
  source 1..80: mol_type = other DNA

SEQ ID NO: 72194 - DNA, 80 bp, synthetic construct; identical to SEQ ID NO: 38184
  source 1..80: mol_type = other DNA

SEQ ID NO: 72195 - DNA, 80 bp, synthetic construct; identical to SEQ ID NO: 38185
  source 1..80: mol_type = other DNA

SEQ ID NO: 72196 - DNA, 80 bp, synthetic construct; identical to SEQ ID NO: 38186
  source 1..80: mol_type = other DNA

SEQ ID NO: 72197 - DNA, 80 bp, synthetic construct; identical to SEQ ID NO: 13427
  source 1..80: mol_type = other DNA

SEQ ID NO: 72198 - DNA, 80 bp, synthetic construct; identical to SEQ ID NO: 38188
  source 1..80: mol_type = other DNA

SEQ ID NO: 72199 - DNA, 80 bp, synthetic construct; identical to SEQ ID NO: 38189
  source 1..80: mol_type = other DNA

SEQ ID NO: 72200 - DNA, 80 bp, synthetic construct; identical to SEQ ID NO: 38190
  source 1..80: mol_type = other DNA

SEQ ID NO: 72201 - DNA, 80 bp, synthetic construct; identical to SEQ ID NO: 38191
  source 1..80: mol_type = other DNA

SEQ ID NO: 72202 - DNA, 80 bp, synthetic construct; identical to SEQ ID NO: 13428
  source 1..80: mol_type = other DNA

SEQ ID NO: 72203 - DNA, 80 bp, synthetic construct; identical to SEQ ID NO: 38193
  source 1..80: mol_type = other DNA

SEQ ID NO: 72204 - DNA, 80 bp, synthetic construct; identical to SEQ ID NO: 38194
  source 1..80: mol_type = other DNA

SEQ ID NO: 72205 - DNA, 80 bp, synthetic construct; identical to SEQ ID NO: 13429
  source 1..80: mol_type = other DNA

SEQ ID NO: 72206 - DNA, 80 bp, synthetic construct; identical to SEQ ID NO: 38197
  source 1..80: mol_type = other DNA

SEQ ID NO: 72207 - DNA, 80 bp, synthetic construct; identical to SEQ ID NO: 38198
  source 1..80: mol_type = other DNA

SEQ ID NO: 72208 - DNA, 80 bp, synthetic construct; identical to SEQ ID NO: 38199
  source 1..80: mol_type = other DNA

SEQ ID NO: 72209 - DNA, 80 bp, synthetic construct; identical to SEQ ID NO: 13430
  source 1..80: mol_type = other DNA

SEQ ID NO: 72210 - DNA, 80 bp, synthetic construct; identical to SEQ ID NO: 38201
  source 1..80: mol_type = other DNA

SEQ ID NO: 72211 - DNA, 80 bp, synthetic construct; identical to SEQ ID NO: 38202
  source 1..80: mol_type = other DNA

SEQ ID NO: 72212 - DNA, 80 bp, synthetic construct; identical to SEQ ID NO: 38203
  source 1..80: mol_type = other DNA

SEQ ID NO: 72213 - DNA, 80 bp, synthetic construct; identical to SEQ ID NO: 13431
  source 1..80: mol_type = other DNA

SEQ ID NO: 72214 - DNA, 80 bp, synthetic construct; identical to SEQ ID NO: 38205
  source 1..80: mol_type = other DNA

SEQ ID NO: 72215 - DNA, 80 bp, synthetic construct; identical to SEQ ID NO: 38206
  source 1..80: mol_type = other DNA

SEQ ID NO: 72216 - DNA, 80 bp, synthetic construct; identical to SEQ ID NO: 38207
  source 1..80: mol_type = other DNA

SEQ ID NO: 72217 - DNA, 80 bp, synthetic construct; identical to SEQ ID NO: 13432
  source 1..80: mol_type = other DNA

SEQ ID NO: 72218 - DNA, 80 bp, synthetic construct; identical to SEQ ID NO: 38209
  source 1..80: mol_type = other DNA

SEQ ID NO: 72219 - DNA, 80 bp, synthetic construct; identical to SEQ ID NO: 38210
  source 1..80: mol_type = other DNA

SEQ ID NO: 72220 - DNA, 80 bp, synthetic construct; identical to SEQ ID NO: 38211
  source 1..80: mol_type = other DNA

SEQ ID NO: 72221 - DNA, 80 bp, synthetic construct; identical to SEQ ID NO: 13433
  source 1..80: mol_type = other DNA

SEQ ID NO: 72222 - DNA, 80 bp, synthetic construct; identical to SEQ ID NO: 38213
  source 1..80: mol_type = other DNA

SEQ ID NO: 72223 - DNA, 80 bp, synthetic construct; identical to SEQ ID NO: 38214
  source 1..80: mol_type = other DNA

SEQ ID NO: 72224 - DNA, 80 bp, synthetic construct; identical to SEQ ID NO: 38215
  source 1..80: mol_type = other DNA

SEQ ID NO: 72225 - DNA, 80 bp, synthetic construct; identical to SEQ ID NO: 13434
  source 1..80: mol_type = other DNA

SEQ ID NO: 72226 - DNA, 80 bp, synthetic construct; identical to SEQ ID NO: 38217
  source 1..80: mol_type = other DNA

SEQ ID NO: 72227 - DNA, 80 bp, synthetic construct; identical to SEQ ID NO: 38218
  source 1..80: mol_type = other DNA

SEQ ID NO: 72228 - DNA, 80 bp, synthetic construct; identical to SEQ ID NO: 38219
  source 1..80: mol_type = other DNA

SEQ ID NO: 72229 - DNA, 80 bp, synthetic construct; identical to SEQ ID NO: 38220
  source 1..80: mol_type = other DNA

SEQ ID NO: 72230 - DNA, 80 bp, synthetic construct; identical to SEQ ID NO: 13435
  source 1..80: mol_type = other DNA

SEQ ID NO: 72231 - DNA, 80 bp, synthetic construct; identical to SEQ ID NO: 38222
  source 1..80: mol_type = other DNA

SEQ ID NO: 72232 - DNA, 80 bp, synthetic construct; identical to SEQ ID NO: 38223
  source 1..80: mol_type = other DNA

SEQ ID NO: 72233 - DNA, 80 bp, synthetic construct; identical to SEQ ID NO: 38224
  source 1..80: mol_type = other DNA

SEQ ID NO: 72234 - DNA, 80 bp, synthetic construct; identical to SEQ ID NO: 13436
  source 1..80: mol_type = other DNA

SEQ ID NO: 72235 - DNA, 80 bp, synthetic construct; identical to SEQ ID NO: 38226
  source 1..80: mol_type = other DNA

SEQ ID NO: 72236 - DNA, 80 bp, synthetic construct; identical to SEQ ID NO: 38228
  source 1..80: mol_type = other DNA

SEQ ID NO: 72237 - DNA, 80 bp, synthetic construct; identical to SEQ ID NO: 13437
  source 1..80: mol_type = other DNA

SEQ ID NO: 72238 - DNA, 80 bp, synthetic construct; identical to SEQ ID NO: 38230
  source 1..80: mol_type = other DNA

SEQ ID NO: 72239 - DNA, 80 bp, synthetic construct; identical to SEQ ID NO: 38231
  source 1..80: mol_type = other DNA

SEQ ID NO: 72240 - DNA, 80 bp, synthetic construct; identical to SEQ ID NO: 38232
  source 1..80: mol_type = other DNA

SEQ ID NO: 72241 - DNA, 80 bp, synthetic construct; identical to SEQ ID NO: 13438
  source 1..80: mol_type = other DNA

SEQ ID NO: 72242 - DNA, 80 bp, synthetic construct; identical to SEQ ID NO: 38234
  source 1..80: mol_type = other DNA

SEQ ID NO: 72243 - DNA, 80 bp, synthetic construct; identical to SEQ ID NO: 38235
  source 1..80: mol_type = other DNA

SEQ ID NO: 72244 - DNA, 80 bp, synthetic construct; identical to SEQ ID NO: 38236
  source 1..80: mol_type = other DNA

SEQ ID NO: 72245 - DNA, 80 bp, synthetic construct; identical to SEQ ID NO: 13439
  source 1..80: mol_type = other DNA

SEQ ID NO: 72246 - DNA, 80 bp, synthetic construct; identical to SEQ ID NO: 38238
  source 1..80: mol_type = other DNA

SEQ ID NO: 72247 - DNA, 80 bp, synthetic construct; identical to SEQ ID NO: 38239
  source 1..80: mol_type = other DNA

SEQ ID NO: 72248 - DNA, 80 bp, synthetic construct; identical to SEQ ID NO: 38240
  source 1..80: mol_type = other DNA

SEQ ID NO: 72249 - DNA, 80 bp, synthetic construct; identical to SEQ ID NO: 13440
  source 1..80: mol_type = other DNA

SEQ ID NO: 72250 - DNA, 80 bp, synthetic construct; identical to SEQ ID NO: 38242
  source 1..80: mol_type = other DNA

SEQ ID NO: 72251 - DNA, 80 bp, synthetic construct; identical to SEQ ID NO: 38243
  source 1..80: mol_type = other DNA

SEQ ID NO: 72252 - DNA, 80 bp, synthetic construct; identical to SEQ ID NO: 13441
  source 1..80: mol_type = other DNA

SEQ ID NO: 72253 - DNA, 80 bp, synthetic construct; identical to SEQ ID NO: 38245
  source 1..80: mol_type = other DNA

SEQ ID NO: 72254 - DNA, 80 bp, synthetic construct; identical to SEQ ID NO: 38246
  source 1..80: mol_type = other DNA

SEQ ID NO: 72255 - DNA, 80 bp, synthetic construct; identical to SEQ ID NO: 38247
  source 1..80: mol_type = other DNA

SEQ ID NO: 72256 - DNA, 80 bp, synthetic construct; identical to SEQ ID NO: 38248
  source 1..80: mol_type = other DNA

SEQ ID NO: 72257 - DNA, 80 bp, synthetic construct; identical to SEQ ID NO: 13442
  source 1..80: mol_type = other DNA

SEQ ID NO: 72258 - DNA, 80 bp, synthetic construct; identical to SEQ ID NO: 38250
  source 1..80: mol_type = other DNA

SEQ ID NO: 72259 - DNA, 80 bp, synthetic construct; identical to SEQ ID NO: 38251
  source 1..80: mol_type = other DNA

SEQ ID NO: 72260 - DNA, 80 bp, synthetic construct; identical to SEQ ID NO: 13443
  source 1..80: mol_type = other DNA

SEQ ID NO: 72261 - DNA, 80 bp, synthetic construct; identical to SEQ ID NO: 38253
  source 1..80: mol_type = other DNA

SEQ ID NO: 72262 - DNA, 80 bp, synthetic construct; identical to SEQ ID NO: 38254
  source 1..80: mol_type = other DNA

SEQ ID NO: 72263 - DNA, 80 bp, synthetic construct; identical to SEQ ID NO: 13444
  source 1..80: mol_type = other DNA

SEQ ID NO: 72264 - DNA, 80 bp, synthetic construct; identical to SEQ ID NO: 38256
  source 1..80: mol_type = other DNA

SEQ ID NO: 72265 - DNA, 80 bp, synthetic construct; identical to SEQ ID NO: 38258
  source 1..80: mol_type = other DNA

SEQ ID NO: 72266 - DNA, 80 bp, synthetic construct; identical to SEQ ID NO: 38260
  source 1..80: mol_type = other DNA

SEQ ID NO: 72267 - DNA, 80 bp, synthetic construct; identical to SEQ ID NO: 38261
  source 1..80: mol_type = other DNA

SEQ ID NO: 72268 - DNA, 80 bp, synthetic construct; identical to SEQ ID NO: 13446
  source 1..80: mol_type = other DNA

SEQ ID NO: 72269 - DNA, 80 bp, synthetic construct; identical to SEQ ID NO: 38264
  source 1..80: mol_type = other DNA

SEQ ID NO: 72270 - DNA, 80 bp, synthetic construct; identical to SEQ ID NO: 38265
  source 1..80: mol_type = other DNA

SEQ ID NO: 72271 - DNA, 80 bp, synthetic construct; identical to SEQ ID NO: 13447
  source 1..80: mol_type = other DNA

SEQ ID NO: 72272 - DNA, 80 bp, synthetic construct; identical to SEQ ID NO: 38269
  source 1..80: mol_type = other DNA

SEQ ID NO: 72273 - DNA, 80 bp, synthetic construct; identical to SEQ ID NO: 38271
  source 1..80: mol_type = other DNA

SEQ ID NO: 72274 - DNA, 80 bp, synthetic construct; identical to SEQ ID NO: 13449
  source 1..80: mol_type = other DNA

SEQ ID NO: 72275 - DNA, 80 bp, synthetic construct; identical to SEQ ID NO: 38274
  source 1..80: mol_type = other DNA

SEQ ID NO: 72276 - DNA, 80 bp, synthetic construct; identical to SEQ ID NO: 38275
  source 1..80: mol_type = other DNA

SEQ ID NO: 72277 - DNA, 80 bp, synthetic construct; identical to SEQ ID NO: 38276
  source 1..80: mol_type = other DNA

SEQ ID NO: 72278 - DNA, 80 bp, synthetic construct; identical to SEQ ID NO: 13450
  source 1..80: mol_type = other DNA

SEQ ID NO: 72279 - DNA, 80 bp, synthetic construct; identical to SEQ ID NO: 38279
  source 1..80: mol_type = other DNA

SEQ ID NO: 72280 - DNA, 80 bp, synthetic construct; identical to SEQ ID NO: 38280
  source 1..80: mol_type = other DNA

SEQ ID NO: 72281 - DNA, 80 bp, synthetic construct; identical to SEQ ID NO: 38281
  source 1..80: mol_type = other DNA

SEQ ID NO: 72282 - DNA, 80 bp, synthetic construct; identical to SEQ ID NO: 13451
  source 1..80: mol_type = other DNA

SEQ ID NO: 72283 - DNA, 80 bp, synthetic construct; identical to SEQ ID NO: 38283
  source 1..80: mol_type = other DNA

SEQ ID NO: 72284 - DNA, 80 bp, synthetic construct; identical to SEQ ID NO: 38284
  source 1..80: mol_type = other DNA

SEQ ID NO: 72285 - DNA, 80 bp, synthetic construct; identical to SEQ ID NO: 13452
  source 1..80: mol_type = other DNA

SEQ ID NO: 72286 - DNA, 80 bp, synthetic construct; identical to SEQ ID NO: 38287
  source 1..80: mol_type = other DNA

SEQ ID NO: 72287 - DNA, 80 bp, synthetic construct; identical to SEQ ID NO: 38288
  source 1..80: mol_type = other DNA

SEQ ID NO: 72288 - DNA, 80 bp, synthetic construct; identical to SEQ ID NO: 38289
  source 1..80: mol_type = other DNA

SEQ ID NO: 72289 - DNA, 80 bp, synthetic construct; identical to SEQ ID NO: 13453
  source 1..80: mol_type = other DNA

SEQ ID NO: 72290 - DNA, 80 bp, synthetic construct; identical to SEQ ID NO: 38291
  source 1..80: mol_type = other DNA

SEQ ID NO: 72291 - DNA, 80 bp, synthetic construct; identical to SEQ ID NO: 38292
  source 1..80: mol_type = other DNA

SEQ ID NO: 72292 - DNA, 80 bp, synthetic construct; identical to SEQ ID NO: 13454
  source 1..80: mol_type = other DNA

SEQ ID NO: 72293 - DNA, 80 bp, synthetic construct; identical to SEQ ID NO: 38294
  source 1..80: mol_type = other DNA

SEQ ID NO: 72294 - DNA, 80 bp, synthetic construct; identical to SEQ ID NO: 38295
  source 1..80: mol_type = other DNA

SEQ ID NO: 72295 - DNA, 80 bp, synthetic construct; identical to SEQ ID NO: 38296
  source 1..80: mol_type = other DNA

SEQ ID NO: 72296 - DNA, 80 bp, synthetic construct; identical to SEQ ID NO: 38297
  source 1..80: mol_type = other DNA

SEQ ID NO: 72297 - DNA, 80 bp, synthetic construct; identical to SEQ ID NO: 13455
  source 1..80: mol_type = other DNA

SEQ ID NO: 72298 - DNA, 80 bp, synthetic construct; identical to SEQ ID NO: 38300
  source 1..80: mol_type = other DNA

SEQ ID NO: 72299 - DNA, 80 bp, synthetic construct; identical to SEQ ID NO: 13456
  source 1..80: mol_type = other DNA

SEQ ID NO: 72300 - DNA, 80 bp, synthetic construct; identical to SEQ ID NO: 38303
  source 1..80: mol_type = other DNA

SEQ ID NO: 72301 - DNA, 80 bp, synthetic construct; identical to SEQ ID NO: 38304
  source 1..80: mol_type = other DNA

SEQ ID NO: 72302 - DNA, 80 bp, synthetic construct; identical to SEQ ID NO: 38305
  source 1..80: mol_type = other DNA

SEQ ID NO: 72303 - DNA, 80 bp, synthetic construct; identical to SEQ ID NO: 13457
  source 1..80: mol_type = other DNA

SEQ ID NO: 72304 - DNA, 80 bp, synthetic construct; identical to SEQ ID NO: 38307
  source 1..80: mol_type = other DNA

SEQ ID NO: 72305 - DNA, 80 bp, synthetic construct; identical to SEQ ID NO: 38308
  source 1..80: mol_type = other DNA

SEQ ID NO: 72306 - DNA, 80 bp, synthetic construct; identical to SEQ ID NO: 13458
  source 1..80: mol_type = other DNA

SEQ ID NO: 72307 - DNA, 80 bp, synthetic construct; identical to SEQ ID NO: 38310
  source 1..80: mol_type = other DNA

SEQ ID NO: 72308 - DNA, 80 bp, synthetic construct; identical to SEQ ID NO: 38311
  source 1..80: mol_type = other DNA

SEQ ID NO: 72309 - DNA, 80 bp, synthetic construct; identical to SEQ ID NO: 38312
  source 1..80: mol_type = other DNA

SEQ ID NO: 72310 - DNA, 80 bp, synthetic construct; identical to SEQ ID NO: 13459
  source 1..80: mol_type = other DNA

SEQ ID NO: 72311 - DNA, 80 bp, synthetic construct; identical to SEQ ID NO: 38314
  source 1..80: mol_type = other DNA

SEQ ID NO: 72312 - DNA, 80 bp, synthetic construct; identical to SEQ ID NO: 38315
  source 1..80: mol_type = other DNA

SEQ ID NO: 72313 - DNA, 80 bp, synthetic construct; identical to SEQ ID NO: 38316
  source 1..80: mol_type = other DNA

SEQ ID NO: 72314 - DNA, 80 bp, synthetic construct; identical to SEQ ID NO: 13460
  source 1..80: mol_type = other DNA

SEQ ID NO: 72315 - DNA, 80 bp, synthetic construct; identical to SEQ ID NO: 38318
  source 1..80: mol_type = other DNA

SEQ ID NO: 72316 - DNA, 80 bp, synthetic construct; identical to SEQ ID NO: 38319
  source 1..80: mol_type = other DNA

SEQ ID NO: 72317 - DNA, 80 bp, synthetic construct; identical to SEQ ID NO: 38320
  source 1..80: mol_type = other DNA

SEQ ID NO: 72318 - DNA, 80 bp, synthetic construct; identical to SEQ ID NO: 38321
  source 1..80: mol_type = other DNA

SEQ ID NO: 72319 - DNA, 80 bp, synthetic construct; identical to SEQ ID NO: 13461
  source 1..80: mol_type = other DNA

SEQ ID NO: 72320 - DNA, 80 bp, synthetic construct; identical to SEQ ID NO: 38323
  source 1..80: mol_type = other DNA

SEQ ID NO: 72321 - DNA, 80 bp, synthetic construct; identical to SEQ ID NO: 38324
  source 1..80: mol_type = other DNA

SEQ ID NO: 72322 - DNA, 80 bp, synthetic construct; identical to SEQ ID NO: 38325
  source 1..80: mol_type = other DNA

SEQ ID NO: 72323 - DNA, 80 bp, synthetic construct; identical to SEQ ID NO: 13462
  source 1..80: mol_type = other DNA

SEQ ID NO: 72324 - DNA, 80 bp, synthetic construct; identical to SEQ ID NO: 38327
  source 1..80: mol_type = other DNA

SEQ ID NO: 72325 - DNA, 80 bp, synthetic construct; identical to SEQ ID NO: 38328
  source 1..80: mol_type = other DNA

SEQ ID NO: 72326 - DNA, 80 bp, synthetic construct; identical to SEQ ID NO: 13463
  source 1..80: mol_type = other DNA

SEQ ID NO: 72327 - DNA, 80 bp, synthetic construct; identical to SEQ ID NO: 38330
  source 1..80: mol_type = other DNA

SEQ ID NO: 72328 - DNA, 80 bp, synthetic construct; identical to SEQ ID NO: 38331
  source 1..80: mol_type = other DNA

SEQ ID NO: 72329 - DNA, 80 bp, synthetic construct; identical to SEQ ID NO: 38332
  source 1..80: mol_type = other DNA

SEQ ID NO: 72330 - DNA, 80 bp, synthetic construct; identical to SEQ ID NO: 13464
  source 1..80: mol_type = other DNA

SEQ ID NO: 72331 - DNA, 80 bp, synthetic construct; identical to SEQ ID NO: 38335
  source 1..80: mol_type = other DNA

SEQ ID NO: 72332 - DNA, 80 bp, synthetic construct; identical to SEQ ID NO: 38336
  source 1..80: mol_type = other DNA

SEQ ID NO: 72333 - DNA, 80 bp, synthetic construct; identical to SEQ ID NO: 13465
  source 1..80: mol_type = other DNA

SEQ ID NO: 72334 - DNA, 80 bp, synthetic construct; identical to SEQ ID NO: 38339
  source 1..80: mol_type = other DNA

SEQ ID NO: 72335 - DNA, 80 bp, synthetic construct; identical to SEQ ID NO: 38340
  source 1..80: mol_type = other DNA

SEQ ID NO: 72336 - DNA, 80 bp, synthetic construct; identical to SEQ ID NO: 38341
  source 1..80: mol_type = other DNA

SEQ ID NO: 72337 - DNA, 80 bp, synthetic construct; identical to SEQ ID NO: 13466
  source 1..80: mol_type = other DNA

SEQ ID NO: 72338 - DNA, 80 bp, synthetic construct; identical to SEQ ID NO: 38343
  source 1..80: mol_type = other DNA

SEQ ID NO: 72339 - DNA, 80 bp, synthetic construct; identical to SEQ ID NO: 38344
  source 1..80: mol_type = other DNA

SEQ ID NO: 72340 - DNA, 80 bp, synthetic construct; identical to SEQ ID NO: 13467
  source 1..80: mol_type = other DNA

SEQ ID NO: 72341 - DNA, 80 bp, synthetic construct; identical to SEQ ID NO: 38346
  source 1..80: mol_type = other DNA

SEQ ID NO: 72342 - DNA, 80 bp, synthetic construct; identical to SEQ ID NO: 38347
  source 1..80: mol_type = other DNA

SEQ ID NO: 72343 - DNA, 80 bp, synthetic construct; identical to SEQ ID NO: 13468
  source 1..80: mol_type = other DNA

SEQ ID NO: 72344 - DNA, 80 bp, synthetic construct; identical to SEQ ID NO: 38351
  source 1..80: mol_type = other DNA

SEQ ID NO: 72345 - DNA, 80 bp, synthetic construct; identical to SEQ ID NO: 38352
  source 1..80: mol_type = other DNA

SEQ ID NO: 72346 - DNA, 80 bp, synthetic construct; identical to SEQ ID NO: 13469
  source 1..80: mol_type = other DNA

SEQ ID NO: 72347 - DNA, 80 bp, synthetic construct; identical to SEQ ID NO: 38354
  source 1..80: mol_type = other DNA

SEQ ID NO: 72348 - DNA, 80 bp, synthetic construct; identical to SEQ ID NO: 38355
  source 1..80: mol_type = other DNA

SEQ ID NO: 72349 - DNA, 80 bp, synthetic construct; identical to SEQ ID NO: 38356
  source 1..80: mol_type = other DNA

SEQ ID NO: 72350 - DNA, 80 bp, synthetic construct; identical to SEQ ID NO: 13470
  source 1..80: mol_type = other DNA

SEQ ID NO: 72351 - DNA, 80 bp, synthetic construct; identical to SEQ ID NO: 38358
  source 1..80: mol_type = other DNA

SEQ ID NO: 72352 - DNA, 80 bp, synthetic construct; identical to SEQ ID NO: 38359
  source 1..80: mol_type = other DNA

SEQ ID NO: 72353 - DNA, 80 bp, synthetic construct; identical to SEQ ID NO: 38360
  source 1..80: mol_type = other DNA

SEQ ID NO: 72354 - DNA, 80 bp, synthetic construct; identical to SEQ ID NO: 38361
  source 1..80: mol_type = other DNA

SEQ ID NO: 72355 - DNA, 80 bp, synthetic construct; identical to SEQ ID NO: 13471
  source 1..80: mol_type = other DNA

SEQ ID NO: 72356 - DNA, 80 bp, synthetic construct; identical to SEQ ID NO: 38363
  source 1..80: mol_type = other DNA

SEQ ID NO: 72357 - DNA, 80 bp, synthetic construct; identical to SEQ ID NO: 38364
  source 1..80: mol_type = other DNA

SEQ ID NO: 72358 - DNA, 80 bp, synthetic construct; identical to SEQ ID NO: 38366
  source 1..80: mol_type = other DNA

SEQ ID NO: 72359 - DNA, 80 bp, synthetic construct; identical to SEQ ID NO: 38368
  source 1..80: mol_type = other DNA

SEQ ID NO: 72360 - DNA, 80 bp, synthetic construct; identical to SEQ ID NO: 38369
  source 1..80: mol_type = other DNA

SEQ ID NO: 72361 - DNA, 80 bp, synthetic construct; identical to SEQ ID NO: 13473
  source 1..80: mol_type = other DNA

SEQ ID NO: 72362 - DNA, 80 bp, synthetic construct; identical to SEQ ID NO: 38371
  source 1..80: mol_type = other DNA

SEQ ID NO: 72363 - DNA, 80 bp, synthetic construct; identical to SEQ ID NO: 38372
  source 1..80: mol_type = other DNA

SEQ ID NO: 72364 - DNA, 80 bp, synthetic construct; identical to SEQ ID NO: 13474
  source 1..80: mol_type = other DNA

SEQ ID NO: 72365 - DNA, 80 bp, synthetic construct; identical to SEQ ID NO: 38375
  source 1..80: mol_type = other DNA

SEQ ID NO: 72366 - DNA, 80 bp, synthetic construct; identical to SEQ ID NO: 38376
  source 1..80: mol_type = other DNA

SEQ ID NO: 72367 - DNA, 80 bp, synthetic construct; identical to SEQ ID NO: 13475
  source 1..80: mol_type = other DNA

SEQ ID NO: 72368 - DNA, 80 bp, synthetic construct; identical to SEQ ID NO: 38378
  source 1..80: mol_type = other DNA

SEQ ID NO: 72369 - DNA, 80 bp, synthetic construct; identical to SEQ ID NO: 38379
  source 1..80: mol_type = other DNA

SEQ ID NO: 72370 - DNA, 80 bp, synthetic construct; identical to SEQ ID NO: 38380
  source 1..80: mol_type = other DNA

SEQ ID NO: 72371 - DNA, 80 bp, synthetic construct; identical to SEQ ID NO: 13476
  source 1..80: mol_type = other DNA

SEQ ID NO: 72372 - DNA, 80 bp, synthetic construct; identical to SEQ ID NO: 38382
  source 1..80: mol_type = other DNA

SEQ ID NO: 72373 - DNA, 80 bp, synthetic construct; identical to SEQ ID NO: 38383
  source 1..80: mol_type = other DNA

SEQ ID NO: 72374 - DNA, 80 bp, synthetic construct; identical to SEQ ID NO: 38384
  source 1..80: mol_type = other DNA

SEQ ID NO: 72375 - DNA, 80 bp, synthetic construct; identical to SEQ ID NO: 38385
  source 1..80: mol_type = other DNA

SEQ ID NO: 72376 - DNA, 80 bp, synthetic construct; identical to SEQ ID NO: 13477
  source 1..80: mol_type = other DNA

SEQ ID NO: 72377 - DNA, 80 bp, synthetic construct; identical to SEQ ID NO: 38387
  source 1..80: mol_type = other DNA

SEQ ID NO: 72378 - DNA, 80 bp, synthetic construct; identical to SEQ ID NO: 38388
  source 1..80: mol_type = other DNA

SEQ ID NO: 72379 - DNA, 80 bp, synthetic construct; identical to SEQ ID NO: 38389
  source 1..80: mol_type = other DNA

SEQ ID NO: 72380 - DNA, 80 bp, synthetic construct; identical to SEQ ID NO: 38390
  source 1..80: mol_type = other DNA

SEQ ID NO: 72381 - DNA, 80 bp, synthetic construct; identical to SEQ ID NO: 13478
  source 1..80: mol_type = other DNA

SEQ ID NO: 72382 - DNA, 80 bp, synthetic construct; identical to SEQ ID NO: 38392
  source 1..80: mol_type = other DNA

SEQ ID NO: 72383 - DNA, 80 bp, synthetic construct; identical to SEQ ID NO: 38393
  source 1..80: mol_type = other DNA

SEQ ID NO: 72384 - DNA, 80 bp, synthetic construct; identical to SEQ ID NO: 13479
  source 1..80: mol_type = other DNA

SEQ ID NO: 72385 - DNA, 80 bp, synthetic construct; identical to SEQ ID NO: 38395
  source 1..80: mol_type = other DNA

SEQ ID NO: 72386 - DNA, 80 bp, synthetic construct; identical to SEQ ID NO: 38396
  source 1..80: mol_type = other DNA

SEQ ID NO: 72387 - DNA, 80 bp, synthetic construct; identical to SEQ ID NO: 38397
  source 1..80: mol_type = other DNA

SEQ ID NO: 72388 - DNA, 80 bp, synthetic construct; identical to SEQ ID NO: 38398
  source 1..80: mol_type = other DNA

SEQ ID NO: 72389 - DNA, 80 bp, synthetic construct; identical to SEQ ID NO: 13480
  source 1..80: mol_type = other DNA

SEQ ID NO: 72390 - DNA, 80 bp, synthetic construct; identical to SEQ ID NO: 38400
  source 1..80: mol_type = other DNA

SEQ ID NO: 72391 - DNA, 80 bp, synthetic construct; identical to SEQ ID NO: 38401
  source 1..80: mol_type = other DNA

SEQ ID NO: 72392 - DNA, 80 bp, synthetic construct; identical to SEQ ID NO: 38402
  source 1..80: mol_type = other DNA

SEQ ID NO: 72393 - DNA, 80 bp, synthetic construct; identical to SEQ ID NO: 13481
  source 1..80: mol_type = other DNA

SEQ ID NO: 72394 - DNA, 80 bp, synthetic construct; identical to SEQ ID NO: 38404
  source 1..80: mol_type = other DNA

SEQ ID NO: 72395 - DNA, 80 bp, synthetic construct; identical to SEQ ID NO: 38405
  source 1..80: mol_type = other DNA

SEQ ID NO: 72396 - DNA, 80 bp, synthetic construct; identical to SEQ ID NO: 38406
  source 1..80: mol_type = other DNA

SEQ ID NO: 72397 - DNA, 80 bp, synthetic construct; identical to SEQ ID NO: 13482
  source 1..80: mol_type = other DNA

SEQ ID NO: 72398 - DNA, 80 bp, synthetic construct; identical to SEQ ID NO: 38408
  source 1..80: mol_type = other DNA

SEQ ID NO: 72399 - DNA, 80 bp, synthetic construct; identical to SEQ ID NO: 38409
  source 1..80: mol_type = other DNA

SEQ ID NO: 72400 - DNA, 80 bp, synthetic construct; identical to SEQ ID NO: 13483
  source 1..80: mol_type = other DNA

SEQ ID NO: 72401 - DNA, 80 bp, synthetic construct; identical to SEQ ID NO: 38411
  source 1..80: mol_type = other DNA

SEQ ID NO: 72402 - DNA, 80 bp, synthetic construct; identical to SEQ ID NO: 38412
  source 1..80: mol_type = other DNA

SEQ ID NO: 72403 - DNA, 80 bp, synthetic construct; identical to SEQ ID NO: 38413
  source 1..80: mol_type = other DNA

SEQ ID NO: 72404 - DNA, 80 bp, synthetic construct; identical to SEQ ID NO: 38414
  source 1..80: mol_type = other DNA

SEQ ID NO: 72405 - DNA, 80 bp, synthetic construct; identical to SEQ ID NO: 13484
  source 1..80: mol_type = other DNA

SEQ ID NO: 72406 - DNA, 80 bp, synthetic construct; identical to SEQ ID NO: 38416
  source 1..80: mol_type = other DNA

SEQ ID NO: 72407 - DNA, 80 bp, synthetic construct; identical to SEQ ID NO: 38418
  source 1..80: mol_type = other DNA

SEQ ID NO: 72408 - DNA, 80 bp, synthetic construct; identical to SEQ ID NO: 13485
  source 1..80: mol_type = other DNA

SEQ ID NO: 72409 - DNA, 80 bp, synthetic construct; identical to SEQ ID NO: 38420
  source 1..80: mol_type = other DNA

SEQ ID NO: 72410 - DNA, 80 bp, synthetic construct; identical to SEQ ID NO: 38421
  source 1..80: mol_type = other DNA

SEQ ID NO: 72411 - DNA, 80 bp, synthetic construct; identical to SEQ ID NO: 38422
  source 1..80: mol_type = other DNA

SEQ ID NO: 72412 - DNA, 80 bp, synthetic construct; identical to SEQ ID NO: 13486
  source 1..80: mol_type = other DNA

SEQ ID NO: 72413 - DNA, 80 bp, synthetic construct; identical to SEQ ID NO: 38424
  source 1..80: mol_type = other DNA

SEQ ID NO: 72414 - DNA, 80 bp, synthetic construct; identical to SEQ ID NO: 38425
  source 1..80: mol_type = other DNA

SEQ ID NO: 72415 - DNA, 80 bp, synthetic construct; identical to SEQ ID NO: 38426
  source 1..80: mol_type = other DNA

SEQ ID NO: 72416 - DNA, 80 bp, synthetic construct; identical to SEQ ID NO: 13487
  source 1..80: mol_type = other DNA

SEQ ID NO: 72417 - DNA, 80 bp, synthetic construct; identical to SEQ ID NO: 38429
  source 1..80: mol_type = other DNA

SEQ ID NO: 72418 - DNA, 80 bp, synthetic construct; identical to SEQ ID NO: 38430
  source 1..80: mol_type = other DNA

SEQ ID NO: 72419 - DNA, 80 bp, synthetic construct; identical to SEQ ID NO: 13488
  source 1..80: mol_type = other DNA

SEQ ID NO: 72420 - DNA, 80 bp, synthetic construct; identical to SEQ ID NO: 38432
  source 1..80: mol_type = other DNA

SEQ ID NO: 72421 - DNA, 80 bp, synthetic construct; identical to SEQ ID NO: 38433
  source 1..80: mol_type = other DNA

SEQ ID NO: 72422 - DNA, 80 bp, synthetic construct; identical to SEQ ID NO: 38434
  source 1..80: mol_type = other DNA

SEQ ID NO: 72423 - DNA, 80 bp, synthetic construct; identical to SEQ ID NO: 13489
  source 1..80: mol_type = other DNA

SEQ ID NO: 72424 - DNA, 80 bp, synthetic construct; identical to SEQ ID NO: 38437
  source 1..80: mol_type = other DNA

SEQ ID NO: 72425 - DNA, 80 bp, synthetic construct; identical to SEQ ID NO: 38438
  source 1..80: mol_type = other DNA

SEQ ID NO: 72426 - DNA, 80 bp, synthetic construct; identical to SEQ ID NO: 38439
  source 1..80: mol_type = other DNA

SEQ ID NO: 72427 - DNA, 80 bp, synthetic construct; identical to SEQ ID NO: 13490
  source 1..80: mol_type = other DNA

SEQ ID NO: 72428 - DNA, 80 bp, synthetic construct; identical to SEQ ID NO: 38441
  source 1..80: mol_type = other DNA

SEQ ID NO: 72429 - DNA, 80 bp, synthetic construct; identical to SEQ ID NO: 38442
  source 1..80: mol_type = other DNA

SEQ ID NO: 72430 - DNA, 80 bp, synthetic construct; identical to SEQ ID NO: 13491
  source 1..80: mol_type = other DNA

SEQ ID NO: 72431 - DNA, 80 bp, synthetic construct; identical to SEQ ID NO: 38444
  source 1..80: mol_type = other DNA

SEQ ID NO: 72432 - DNA, 80 bp, synthetic construct; identical to SEQ ID NO: 38445
  source 1..80: mol_type = other DNA

SEQ ID NO: 72433 - DNA, 80 bp, synthetic construct; identical to SEQ ID NO: 13492
  source 1..80: mol_type = other DNA

SEQ ID NO: 72434 - DNA, 80 bp, synthetic construct; identical to SEQ ID NO: 38448
  source 1..80: mol_type = other DNA

SEQ ID NO: 72435 - DNA, 80 bp, synthetic construct; identical to SEQ ID NO: 38449
  source 1..80: mol_type = other DNA

SEQ ID NO: 72436 - DNA, 80 bp, synthetic construct; identical to SEQ ID NO: 38450
  source 1..80: mol_type = other DNA

SEQ ID NO: 72437 - DNA, 80 bp, synthetic construct; identical to SEQ ID NO: 38451
  source 1..80: mol_type = other DNA

SEQ ID NO: 72438 - DNA, 80 bp, synthetic construct; identical to SEQ ID NO: 13493
  source 1..80: mol_type = other DNA

SEQ ID NO: 72439 - DNA, 80 bp, synthetic construct; identical to SEQ ID NO: 38453
  source 1..80: mol_type = other DNA

SEQ ID NO: 72440 - DNA, 80 bp, synthetic construct; identical to SEQ ID NO: 38454
  source 1..80: mol_type = other DNA

SEQ ID NO: 72441 - DNA, 80 bp, synthetic construct; identical to SEQ ID NO: 38455
  source 1..80: mol_type = other DNA

SEQ ID NO: 72442 - DNA, 80 bp, synthetic construct; identical to SEQ ID NO: 13494
  source 1..80: mol_type = other DNA

SEQ ID NO: 72443 - DNA, 80 bp, synthetic construct; identical to SEQ ID NO: 38457
  source 1..80: mol_type = other DNA

SEQ ID NO: 72444 - DNA, 80 bp, synthetic construct; identical to SEQ ID NO: 38458
  source 1..80: mol_type = other DNA

SEQ ID NO: 72445 - DNA, 80 bp, synthetic construct; identical to SEQ ID NO: 38459
  source 1..80: mol_type = other DNA

SEQ ID NO: 72446 - DNA, 80 bp, synthetic construct; identical to SEQ ID NO: 13495
  source 1..80: mol_type = other DNA

SEQ ID NO: 72447 - DNA, 80 bp, synthetic construct; identical to SEQ ID NO: 38461
  source 1..80: mol_type = other DNA

SEQ ID NO: 72448 - DNA, 80 bp, synthetic construct; identical to SEQ ID NO: 38462
  source 1..80: mol_type = other DNA

SEQ ID NO: 72449 - DNA, 80 bp, synthetic construct; identical to SEQ ID NO: 13496
  source 1..80: mol_type = other DNA

SEQ ID NO: 72450 - DNA, 80 bp, synthetic construct; identical to SEQ ID NO: 38464
  source 1..80: mol_type = other DNA

SEQ ID NO: 72451 - DNA, 80 bp, synthetic construct; identical to SEQ ID NO: 38465
  source 1..80: mol_type = other DNA

SEQ ID NO: 72452 - DNA, 80 bp, synthetic construct; identical to SEQ ID NO: 38466
  source 1..80: mol_type = other DNA

SEQ ID NO: 72453 - DNA, 80 bp, synthetic construct; identical to SEQ ID NO: 13497
  source 1..80: mol_type = other DNA

SEQ ID NO: 72454 - DNA, 80 bp, synthetic construct; identical to SEQ ID NO: 38468
  source 1..80: mol_type = other DNA

SEQ ID NO: 72455 - DNA, 80 bp, synthetic construct; identical to SEQ ID NO: 38470
  source 1..80: mol_type = other DNA

SEQ ID NO: 72456 - DNA, 80 bp, synthetic construct; identical to SEQ ID NO: 38471
  source 1..80: mol_type = other DNA

SEQ ID NO: 72457 - DNA, 80 bp, synthetic construct; identical to SEQ ID NO: 13498
  source 1..80: mol_type = other DNA

SEQ ID NO: 72458 - DNA, 80 bp, synthetic construct; identical to SEQ ID NO: 38473
  source 1..80: mol_type = other DNA

SEQ ID NO: 72459 - DNA, 80 bp, synthetic construct; identical to SEQ ID NO: 38474
  source 1..80: mol_type = other DNA

SEQ ID NO: 72460 - DNA, 80 bp, synthetic construct; identical to SEQ ID NO: 38475
  source 1..80: mol_type = other DNA

SEQ ID NO: 72461 - DNA, 80 bp, synthetic construct; identical to SEQ ID NO: 13499
  source 1..80: mol_type = other DNA

SEQ ID NO: 72462 - DNA, 80 bp, synthetic construct; identical to SEQ ID NO: 38477
  source 1..80: mol_type = other DNA

SEQ ID NO: 72463 - DNA, 80 bp, synthetic construct; identical to SEQ ID NO: 13500
  source 1..80: mol_type = other DNA

SEQ ID NO: 72464 - DNA, 80 bp, synthetic construct; identical to SEQ ID NO: 38480
  source 1..80: mol_type = other DNA

SEQ ID NO: 72465 - DNA, 80 bp, synthetic construct; identical to SEQ ID NO: 38481
  source 1..80: mol_type = other DNA

SEQ ID NO: 72466 - DNA, 80 bp, synthetic construct; identical to SEQ ID NO: 38482
  source 1..80: mol_type = other DNA

SEQ ID NO: 72467 - DNA, 80 bp, synthetic construct; identical to SEQ ID NO: 38483
  source 1..80: mol_type = other DNA

SEQ ID NO: 72468 - DNA, 80 bp, synthetic construct; identical to SEQ ID NO: 13501
  source 1..80: mol_type = other DNA

SEQ ID NO: 72469 - DNA, 80 bp, synthetic construct; identical to SEQ ID NO: 38485
  source 1..80: mol_type = other DNA

SEQ ID NO: 72470 - DNA, 80 bp, synthetic construct; identical to SEQ ID NO: 13502
  source 1..80: mol_type = other DNA

SEQ ID NO: 72471 - DNA, 80 bp, synthetic construct; identical to SEQ ID NO: 38487
  source 1..80: mol_type = other DNA

SEQ ID NO: 72472 - DNA, 80 bp, synthetic construct; identical to SEQ ID NO: 38488
  source 1..80: mol_type = other DNA

SEQ ID NO: 72473 - DNA, 80 bp, synthetic construct; identical to SEQ ID NO: 38489
  source 1..80: mol_type = other DNA

SEQ ID NO: 72474 - DNA, 80 bp, synthetic construct; identical to SEQ ID NO: 13503
  source 1..80: mol_type = other DNA

SEQ ID NO: 72475 - DNA, 80 bp, synthetic construct; identical to SEQ ID NO: 38491
  source 1..80: mol_type = other DNA

SEQ ID NO: 72476 - DNA, 80 bp, synthetic construct; identical to SEQ ID NO: 38492
  source 1..80: mol_type = other DNA

SEQ ID NO: 72477 - DNA, 80 bp, synthetic construct; identical to SEQ ID NO: 38493
  source 1..80: mol_type = other DNA

SEQ ID NO: 72478 - DNA, 80 bp, synthetic construct; identical to SEQ ID NO: 13504
  source 1..80: mol_type = other DNA

SEQ ID NO: 72479 - DNA, 80 bp, synthetic construct; identical to SEQ ID NO: 38495
  source 1..80: mol_type = other DNA

SEQ ID NO: 72480 - DNA, 80 bp, synthetic construct; identical to SEQ ID NO: 38496
  source 1..80: mol_type = other DNA

SEQ ID NO: 72481 - DNA, 80 bp, synthetic construct; identical to SEQ ID NO: 38497
  source 1..80: mol_type = other DNA

SEQ ID NO: 72482 - DNA, 80 bp, synthetic construct; identical to SEQ ID NO: 38498
  source 1..80: mol_type = other DNA

SEQ ID NO: 72483 - DNA, 80 bp, synthetic construct; identical to SEQ ID NO: 13505
  source 1..80: mol_type = other DNA

SEQ ID NO: 72484 - DNA, 80 bp, synthetic construct; identical to SEQ ID NO: 38500
  source 1..80: mol_type = other DNA

SEQ ID NO: 72485 - DNA, 80 bp, synthetic construct; identical to SEQ ID NO: 38501
  source 1..80: mol_type = other DNA

SEQ ID NO: 72486 - DNA, 80 bp, synthetic construct; identical to SEQ ID NO: 38502
  source 1..80: mol_type = other DNA

SEQ ID NO: 72487 - DNA, 80 bp, synthetic construct; identical to SEQ ID NO: 13506
  source 1..80: mol_type = other DNA

SEQ ID NO: 72488 - DNA, 80 bp, synthetic construct; identical to SEQ ID NO: 38504
  source 1..80: mol_type = other DNA

SEQ ID NO: 72489 - DNA, 80 bp, synthetic construct; identical to SEQ ID NO: 38505
  source 1..80: mol_type = other DNA

SEQ ID NO: 72490 - DNA, 80 bp, synthetic construct; identical to SEQ ID NO: 13507
  source 1..80: mol_type = other DNA

SEQ ID NO: 72491 - DNA, 80 bp, synthetic construct; identical to SEQ ID NO: 38507
  source 1..80: mol_type = other DNA

SEQ ID NO: 72492 - DNA, 80 bp, synthetic construct; identical to SEQ ID NO: 38509
  source 1..80: mol_type = other DNA

SEQ ID NO: 72493 - DNA, 80 bp, synthetic construct; identical to SEQ ID NO: 38510
  source 1..80: mol_type = other DNA

SEQ ID NO: 72494 - DNA, 80 bp, synthetic construct; identical to SEQ ID NO: 13508
  source 1..80: mol_type = other DNA

SEQ ID NO: 72495 - DNA, 80 bp, synthetic construct; identical to SEQ ID NO: 38512
  source 1..80: mol_type = other DNA

SEQ ID NO: 72496 - DNA, 80 bp, synthetic construct; identical to SEQ ID NO: 38513
  source 1..80: mol_type = other DNA

SEQ ID NO: 72497 - DNA, 80 bp, synthetic construct; identical to SEQ ID NO: 38514
  source 1..80: mol_type = other DNA

SEQ ID NO: 72498 - DNA, 80 bp, synthetic construct; identical to SEQ ID NO: 13509
  source 1..80: mol_type = other DNA

SEQ ID NO: 72499 - DNA, 80 bp, synthetic construct; identical to SEQ ID NO: 38516
  source 1..80: mol_type = other DNA

SEQ ID NO: 72500 - DNA, 80 bp, synthetic construct; identical to SEQ ID NO: 38517
  source 1..80: mol_type = other DNA

SEQ ID NO: 72501 - DNA, 80 bp, synthetic construct; identical to SEQ ID NO: 38518
  source 1..80: mol_type = other DNA

SEQ ID NO: 72502 - DNA, 80 bp, synthetic construct; identical to SEQ ID NO: 13510
  source 1..80: mol_type = other DNA

SEQ ID NO: 72503 - DNA, 80 bp, synthetic construct; identical to SEQ ID NO: 38521
  source 1..80: mol_type = other DNA

SEQ ID NO: 72504 - DNA, 80 bp, synthetic construct; identical to SEQ ID NO: 38522
  source 1..80: mol_type = other DNA

SEQ ID NO: 72505 - DNA, 80 bp, synthetic construct; identical to SEQ ID NO: 13511
  source 1..80: mol_type = other DNA

SEQ ID NO: 72506 - DNA, 80 bp, synthetic construct; identical to SEQ ID NO: 38524
  source 1..80: mol_type = other DNA

SEQ ID NO: 72507 - DNA, 80 bp, synthetic construct; identical to SEQ ID NO: 38525
  source 1..80: mol_type = other DNA

SEQ ID NO: 72508 - DNA, 80 bp, synthetic construct; identical to SEQ ID NO: 13512
  source 1..80: mol_type = other DNA

SEQ ID NO: 72509 - DNA, 80 bp, synthetic construct; identical to SEQ ID NO: 38527
  source 1..80: mol_type = other DNA

SEQ ID NO: 72510 - DNA, 80 bp, synthetic construct; identical to SEQ ID NO: 38528
  source 1..80: mol_type = other DNA

SEQ ID NO: 72511 - DNA, 80 bp, synthetic construct; identical to SEQ ID NO: 38529
  source 1..80: mol_type = other DNA

SEQ ID NO: 72512 - DNA, 80 bp, synthetic construct; identical to SEQ ID NO: 13513
  source 1..80: mol_type = other DNA

SEQ ID NO: 72513 - DNA, 80 bp, synthetic construct; identical to SEQ ID NO: 38531
  source 1..80: mol_type = other DNA

SEQ ID NO: 72514 - DNA, 80 bp, synthetic construct; identical to SEQ ID NO: 38532
  source 1..80: mol_type = other DNA

SEQ ID NO: 72515 - DNA, 80 bp, synthetic construct; identical to SEQ ID NO: 38533
  source 1..80: mol_type = other DNA

SEQ ID NO: 72516 - DNA, 80 bp, synthetic construct; identical to SEQ ID NO: 38534
  source 1..80: mol_type = other DNA

SEQ ID NO: 72517 - DNA, 80 bp, synthetic construct; identical to SEQ ID NO: 13514
  source 1..80: mol_type = other DNA

SEQ ID NO: 72518 - DNA, 80 bp, synthetic construct; identical to SEQ ID NO: 38536
  source 1..80: mol_type = other DNA

SEQ ID NO: 72519 - DNA, 80 bp, synthetic construct; identical to SEQ ID NO: 38537
  source 1..80: mol_type = other DNA

SEQ ID NO: 72520 - DNA, 80 bp, synthetic construct; identical to SEQ ID NO: 13515
  source 1..80: mol_type = other DNA

SEQ ID NO: 72521 - DNA, 80 bp, synthetic construct; identical to SEQ ID NO: 38539
  source 1..80: mol_type = other DNA

SEQ ID NO: 72522 - DNA, 80 bp, synthetic construct; identical to SEQ ID NO: 38540
  source 1..80: mol_type = other DNA

SEQ ID NO: 72523 - DNA, 80 bp, synthetic construct; identical to SEQ ID NO: 38541
  source 1..80: mol_type = other DNA

SEQ ID NO: 72524 - DNA, 80 bp, synthetic construct; identical to SEQ ID NO: 38542
  source 1..80: mol_type = other DNA

SEQ ID NO: 72525 - DNA, 80 bp, synthetic construct; identical to SEQ ID NO: 13516
  source 1..80: mol_type = other DNA

SEQ ID NO: 72526 - DNA, 80 bp, synthetic construct; identical to SEQ ID NO: 38544
  source 1..80: mol_type = other DNA

SEQ ID NO: 72527 - DNA, 80 bp, synthetic construct; identical to SEQ ID NO: 38545
  source 1..80: mol_type = other DNA

SEQ ID NO: 72528 - DNA, 80 bp, synthetic construct; identical to SEQ ID NO: 38546
  source 1..80: mol_type = other DNA

SEQ ID NO: 72529 - DNA, 80 bp, synthetic construct; identical to SEQ ID NO: 38547
  source 1..80: mol_type = other DNA

SEQ ID NO: 72530 - DNA, 80 bp, synthetic construct; identical to SEQ ID NO: 13517
  source 1..80: mol_type = other DNA

SEQ ID NO: 72531 - DNA, 80 bp, synthetic construct; identical to SEQ ID NO: 38549
  source 1..80: mol_type = other DNA

SEQ ID NO: 72532 - DNA, 80 bp, synthetic construct; identical to SEQ ID NO: 38550
  source 1..80: mol_type = other DNA

SEQ ID NO: 72533 - DNA, 80 bp, synthetic construct; identical to SEQ ID NO: 13518
  source 1..80: mol_type = other DNA

SEQ ID NO: 72534 - DNA, 80 bp, synthetic construct; identical to SEQ ID NO: 38552
  source 1..80: mol_type = other DNA

SEQ ID NO: 72535 - DNA, 80 bp, synthetic construct; identical to SEQ ID NO: 38553
  source 1..80: mol_type = other DNA

SEQ ID NO: 72536 - DNA, 80 bp, synthetic construct; identical to SEQ ID NO: 38554
  source 1..80: mol_type = other DNA

SEQ ID NO: 72537 - DNA, 80 bp, synthetic construct; identical to SEQ ID NO: 38555
  source 1..80: mol_type = other DNA

SEQ ID NO: 72538 - DNA, 80 bp, synthetic construct; identical to SEQ ID NO: 38557
  source 1..80: mol_type = other DNA

SEQ ID NO: 72539 - DNA, 80 bp, synthetic construct; identical to SEQ ID NO: 38558
  source 1..80: mol_type = other DNA

SEQ ID NO: 72540 - DNA, 80 bp, synthetic construct; identical to SEQ ID NO: 13520
  source 1..80: mol_type = other DNA

SEQ ID NO: 72541 - DNA, 80 bp, synthetic construct; identical to SEQ ID NO: 38560
  source 1..80: mol_type = other DNA

SEQ ID NO: 72542 - DNA, 80 bp, synthetic construct; identical to SEQ ID NO: 38562
  source 1..80: mol_type = other DNA

SEQ ID NO: 72543 - DNA, 80 bp, synthetic construct; identical to SEQ ID NO: 38563
  source 1..80: mol_type = other DNA

SEQ ID NO: 72544 - DNA, 80 bp, synthetic construct; identical to SEQ ID NO: 13521
  source 1..80: mol_type = other DNA

SEQ ID NO: 72545 - DNA, 80 bp, synthetic construct; identical to SEQ ID NO: 38565
  source 1..80: mol_type = other DNA

SEQ ID NO: 72546 - DNA, 80 bp, synthetic construct; identical to SEQ ID NO: 38566
  source 1..80: mol_type = other DNA

SEQ ID NO: 72547 - DNA, 80 bp, synthetic construct; identical to SEQ ID NO: 38567
  source 1..80: mol_type = other DNA

SEQ ID NO: 72548 - DNA, 80 bp, synthetic construct; identical to SEQ ID NO: 13522
  source 1..80: mol_type = other DNA

SEQ ID NO: 72549 - DNA, 80 bp, synthetic construct; identical to SEQ ID NO: 38569
  source 1..80: mol_type = other DNA

SEQ ID NO: 72550 - DNA, 80 bp, synthetic construct; identical to SEQ ID NO: 38571
  source 1..80: mol_type = other DNA

SEQ ID NO: 72551 - DNA, 80 bp, synthetic construct; identical to SEQ ID NO: 13523
  source 1..80: mol_type = other DNA

SEQ ID NO: 72552 - DNA, 80 bp, synthetic construct; identical to SEQ ID NO: 38573
  source 1..80: mol_type = other DNA

SEQ ID NO: 72553 - DNA, 80 bp, synthetic construct; identical to SEQ ID NO: 38574
  source 1..80: mol_type = other DNA

SEQ ID NO: 72554 - DNA, 80 bp, synthetic construct; identical to SEQ ID NO: 13524
  source 1..80: mol_type = other DNA

SEQ ID NO: 72555 - DNA, 80 bp, synthetic construct; identical to SEQ ID NO: 38576
  source 1..80: mol_type = other DNA

SEQ ID NO: 72556 - DNA, 80 bp, synthetic construct; identical to SEQ ID NO: 38577
  source 1..80: mol_type = other DNA

SEQ ID NO: 72557 - DNA, 80 bp, synthetic construct; identical to SEQ ID NO: 38578
  source 1..80: mol_type = other DNA

SEQ ID NO: 72558 - DNA, 80 bp, synthetic construct; identical to SEQ ID NO: 13525
  source 1..80: mol_type = other DNA

SEQ ID NO: 72559 - DNA, 80 bp, synthetic construct; identical to SEQ ID NO: 38580
  source 1..80: mol_type = other DNA

SEQ ID NO: 72560 - DNA, 80 bp, synthetic construct; identical to SEQ ID NO: 38581
  source 1..80: mol_type = other DNA

SEQ ID NO: 72561 - DNA, 80 bp, synthetic construct; identical to SEQ ID NO: 38582
  source 1..80: mol_type = other DNA

SEQ ID NO: 72562 - DNA, 80 bp, synthetic construct; identical to SEQ ID NO: 13526
  source 1..80: mol_type = other DNA

SEQ ID NO: 72563 - DNA, 80 bp, synthetic construct; identical to SEQ ID NO: 38585
  source 1..80: mol_type = other DNA

SEQ ID NO: 72564 - DNA, 80 bp, synthetic construct; identical to SEQ ID NO: 38587
  source 1..80: mol_type = other DNA

SEQ ID NO: 72565 - DNA, 80 bp, synthetic construct; identical to SEQ ID NO: 13527
  source 1..80: mol_type = other DNA

SEQ ID NO: 72566 - DNA, 80 bp, synthetic construct; identical to SEQ ID NO: 38589
  source 1..80: mol_type = other DNA

SEQ ID NO: 72567 - DNA, 80 bp, synthetic construct; identical to SEQ ID NO: 38590
  source 1..80: mol_type = other DNA

SEQ ID NO: 72568 - DNA, 80 bp, synthetic construct; identical to SEQ ID NO: 13528
  source 1..80: mol_type = other DNA

SEQ ID NO: 72569 - DNA, 80 bp, synthetic construct; identical to SEQ ID NO: 38592
  source 1..80: mol_type = other DNA

SEQ ID NO: 72570 - DNA, 80 bp, synthetic construct; identical to SEQ ID NO: 38593
  source 1..80: mol_type = other DNA

SEQ ID NO: 72571 - DNA, 80 bp, synthetic construct; identical to SEQ ID NO: 38594
  source 1..80: mol_type = other DNA

SEQ ID NO: 72572 - DNA, 80 bp, synthetic construct; identical to SEQ ID NO: 38595
  source 1..80: mol_type = other DNA

SEQ ID NO: 72573 - DNA, 80 bp, synthetic construct; identical to SEQ ID NO: 13529
  source 1..80: mol_type = other DNA

SEQ ID NO: 72574 - DNA, 80 bp, synthetic construct; identical to SEQ ID NO: 38597
  source 1..80: mol_type = other DNA

SEQ ID NO: 72575 - DNA, 80 bp, synthetic construct; identical to SEQ ID NO: 38598
  source 1..80: mol_type = other DNA

SEQ ID NO: 72576 - DNA, 80 bp, synthetic construct; identical to SEQ ID NO: 38599
  source 1..80: mol_type = other DNA

SEQ ID NO: 72577 - DNA, 80 bp, synthetic construct; identical to SEQ ID NO: 38600
  source 1..80: mol_type = other DNA

SEQ ID NO: 72578 - DNA, 80 bp, synthetic construct; identical to SEQ ID NO: 13530
  source 1..80: mol_type = other DNA

SEQ ID NO: 72579 - DNA, 80 bp, synthetic construct; identical to SEQ ID NO: 38602
  source 1..80: mol_type = other DNA

SEQ ID NO: 72580 - DNA, 80 bp, synthetic construct; identical to SEQ ID NO: 38603
  source 1..80: mol_type = other DNA

SEQ ID NO: 72581 - DNA, 80 bp, synthetic construct; identical to SEQ ID NO: 38604
  source 1..80: mol_type = other DNA

SEQ ID NO: 72582 - DNA, 80 bp, synthetic construct; identical to SEQ ID NO: 13531
  source 1..80: mol_type = other DNA

SEQ ID NO: 72583 - DNA, 80 bp, synthetic construct; identical to SEQ ID NO: 38606
  source 1..80: mol_type = other DNA

SEQ ID NO: 72584 - DNA, 80 bp, synthetic construct; identical to SEQ ID NO: 38607
  source 1..80: mol_type = other DNA

SEQ ID NO: 72585 - DNA, 80 bp, synthetic construct; identical to SEQ ID NO: 13532
  source 1..80: mol_type = other DNA

SEQ ID NO: 72586 - DNA, 80 bp, synthetic construct; identical to SEQ ID NO: 38609
  source 1..80: mol_type = other DNA

SEQ ID NO: 72587 - DNA, 80 bp, synthetic construct; identical to SEQ ID NO: 38610
  source 1..80: mol_type = other DNA

SEQ ID NO: 72588 - DNA, 80 bp, synthetic construct; identical to SEQ ID NO: 38611
  source 1..80: mol_type = other DNA

SEQ ID NO: 72589 - DNA, 80 bp, synthetic construct; identical to SEQ ID NO: 13533
  source 1..80: mol_type = other DNA

SEQ ID NO: 72590 - DNA, 80 bp, synthetic construct; identical to SEQ ID NO: 38613
  source 1..80: mol_type = other DNA

SEQ ID NO: 72591 - DNA, 80 bp, synthetic construct; identical to SEQ ID NO: 38614
  source 1..80: mol_type = other DNA

SEQ ID NO: 72592 - DNA, 80 bp, synthetic construct; identical to SEQ ID NO: 38615
  source 1..80: mol_type = other DNA

SEQ ID NO: 72593 - DNA, 80 bp, synthetic construct; identical to SEQ ID NO: 38616
  source 1..80: mol_type = other DNA

SEQ ID NO: 72594 - DNA, 80 bp, synthetic construct; identical to SEQ ID NO: 13534
  source 1..80: mol_type = other DNA

SEQ ID NO: 72595 - DNA, 80 bp, synthetic construct; identical to SEQ ID NO: 38618
  source 1..80: mol_type = other DNA

SEQ ID NO: 72596 - DNA, 80 bp, synthetic construct; identical to SEQ ID NO: 38619
  source 1..80: mol_type = other DNA

SEQ ID NO: 72597 - DNA, 80 bp, synthetic construct; identical to SEQ ID NO: 13535
  source 1..80: mol_type = other DNA

SEQ ID NO: 72598 - DNA, 80 bp, synthetic construct; identical to SEQ ID NO: 38621
  source 1..80: mol_type = other DNA

SEQ ID NO: 72599 - DNA, 80 bp, synthetic construct; identical to SEQ ID NO: 38622
  source 1..80: mol_type = other DNA

SEQ ID NO: 72600 - DNA, 80 bp, synthetic construct; identical to SEQ ID NO: 38623
  source 1..80: mol_type = other DNA

SEQ ID NO: 72601 - DNA, 80 bp, synthetic construct; identical to SEQ ID NO: 38624
  source 1..80: mol_type = other DNA

SEQ ID NO: 72602 - DNA, 80 bp, synthetic construct; identical to SEQ ID NO: 13536
  source 1..80: mol_type = other DNA

SEQ ID NO: 72603 - DNA, 80 bp, synthetic construct; identical to SEQ ID NO: 38626
  source 1..80: mol_type = other DNA

SEQ ID NO: 72604 - DNA, 80 bp, synthetic construct; identical to SEQ ID NO: 38627
  source 1..80: mol_type = other DNA

SEQ ID NO: 72605 - DNA, 80 bp, synthetic construct; identical to SEQ ID NO: 38628
  source 1..80: mol_type = other DNA

SEQ ID NO: 72606 - DNA, 80 bp, synthetic construct; identical to SEQ ID NO: 13537
  source 1..80: mol_type = other DNA

SEQ ID NO: 72607 - DNA, 80 bp, synthetic construct; identical to SEQ ID NO: 38630
  source 1..80: mol_type = other DNA

SEQ ID NO: 72608 - DNA, 80 bp, synthetic construct; identical to SEQ ID NO: 38631
  source 1..80: mol_type = other DNA

SEQ ID NO: 72609 - DNA, 80 bp, synthetic construct; identical to SEQ ID NO: 13538
  source 1..80: mol_type = other DNA

SEQ ID NO: 72610 - DNA, 80 bp, synthetic construct; identical to SEQ ID NO: 38633
  source 1..80: mol_type = other DNA

SEQ ID NO: 72611 - DNA, 80 bp, synthetic construct; identical to SEQ ID NO: 38634
  source 1..80: mol_type = other DNA

SEQ ID NO: 72612 - DNA, 80 bp, synthetic construct; identical to SEQ ID NO: 38635
  source 1..80: mol_type = other DNA

SEQ ID NO: 72613 - DNA, 80 bp, synthetic construct; identical to SEQ ID NO: 38636
  source 1..80: mol_type = other DNA

SEQ ID NO: 72614 - DNA, 80 bp, synthetic construct; identical to SEQ ID NO: 13539
  source 1..80: mol_type = other DNA

SEQ ID NO: 72615 - DNA, 80 bp, synthetic construct; identical to SEQ ID NO: 38638
  source 1..80: mol_type = other DNA

SEQ ID NO: 72616 - DNA, 80 bp, synthetic construct; identical to SEQ ID NO: 38639
  source 1..80: mol_type = other DNA

SEQ ID NO: 72617 - DNA, 80 bp, synthetic construct; identical to SEQ ID NO: 38640
  source 1..80: mol_type = other DNA

SEQ ID NO: 72618 - DNA, 80 bp, synthetic construct; identical to SEQ ID NO: 13540
  source 1..80: mol_type = other DNA

SEQ ID NO: 72619 - DNA, 80 bp, synthetic construct; identical to SEQ ID NO: 38642
  source 1..80: mol_type = other DNA

SEQ ID NO: 72620 - DNA, 80 bp, synthetic construct; identical to SEQ ID NO: 38643
  source 1..80: mol_type = other DNA

SEQ ID NO: 72621 - DNA, 80 bp, synthetic construct; identical to SEQ ID NO: 13541
  source 1..80: mol_type = other DNA

SEQ ID NO: 72622 - DNA, 80 bp, synthetic construct; identical to SEQ ID NO: 38645
  source 1..80: mol_type = other DNA

SEQ ID NO: 72623 - DNA, 80 bp, synthetic construct; identical to SEQ ID NO: 38646
  source 1..80: mol_type = other DNA

SEQ ID NO: 72624 - DNA, 80 bp, synthetic construct; identical to SEQ ID NO: 38647
  source 1..80: mol_type = other DNA

SEQ ID NO: 72625 - DNA, 80 bp, synthetic construct; identical to SEQ ID NO: 38648
  source 1..80: mol_type = other DNA

SEQ ID NO: 72626 - DNA, 80 bp, synthetic construct; identical to SEQ ID NO: 13542
  source 1..80: mol_type = other DNA

SEQ ID NO: 72627 - DNA, 80 bp, synthetic construct; identical to SEQ ID NO: 38650
  source 1..80: mol_type = other DNA

SEQ ID NO: 72628 - DNA, 80 bp, synthetic construct; identical to SEQ ID NO: 38651
  source 1..80: mol_type = other DNA

SEQ ID NO: 72629 - DNA, 80 bp, synthetic construct; identical to SEQ ID NO: 13543
  source 1..80: mol_type = other DNA

SEQ ID NO: 72630 - DNA, 80 bp, synthetic construct; identical to SEQ ID NO: 38653
  source 1..80: mol_type = other DNA

SEQ ID NO: 72631 - DNA, 80 bp, synthetic construct; identical to SEQ ID NO: 38654
  source 1..80: mol_type = other DNA

SEQ ID NO: 72632 - DNA, 80 bp, synthetic construct; identical to SEQ ID NO: 38655
  source 1..80: mol_type = other DNA

SEQ ID NO: 72633 - DNA, 80 bp, synthetic construct; identical to SEQ ID NO: 13544
  source 1..80: mol_type = other DNA

SEQ ID NO: 72634 - DNA, 80 bp, synthetic construct; identical to SEQ ID NO: 38657
  source 1..80: mol_type = other DNA

SEQ ID NO: 72635 - DNA, 80 bp, synthetic construct; identical to SEQ ID NO: 38658
  source 1..80: mol_type = other DNA

SEQ ID NO: 72636 - DNA, 80 bp, synthetic construct; identical to SEQ ID NO: 38659
  source 1..80: mol_type = other DNA

SEQ ID NO: 72637 - DNA, 80 bp, synthetic construct; identical to SEQ ID NO: 38660
  source 1..80: mol_type = other DNA

SEQ ID NO: 72638 - DNA, 80 bp, synthetic construct; identical to SEQ ID NO: 13545
  source 1..80: mol_type = other DNA

SEQ ID NO: 72639 - DNA, 80 bp, synthetic construct; identical to SEQ ID NO: 38662
  source 1..80: mol_type = other DNA

SEQ ID NO: 72640 - DNA, 80 bp, synthetic construct; identical to SEQ ID NO: 38663
  source 1..80: mol_type = other DNA

SEQ ID NO: 72641 - DNA, 80 bp, synthetic construct; identical to SEQ ID NO: 13546
  source 1..80: mol_type = other DNA

SEQ ID NO: 72642 - DNA, 80 bp, synthetic construct; identical to SEQ ID NO: 38665
  source 1..80: mol_type = other DNA

SEQ ID NO: 72643 - DNA, 80 bp, synthetic construct; identical to SEQ ID NO: 38666
  source 1..80: mol_type = other DNA

SEQ ID NO: 72644 - DNA, 80 bp, synthetic construct; identical to SEQ ID NO: 38667
  source 1..80: mol_type = other DNA

SEQ ID NO: 72645 - DNA, 80 bp, synthetic construct; identical to SEQ ID NO: 13547
  source 1..80: mol_type = other DNA

SEQ ID NO: 72646 - DNA, 80 bp, synthetic construct; identical to SEQ ID NO: 38669
  source 1..80: mol_type = other DNA

SEQ ID NO: 72647 - DNA, 80 bp, synthetic construct; identical to SEQ ID NO: 38670
  source 1..80: mol_type = other DNA

SEQ ID NO: 72648 - DNA, 80 bp, synthetic construct; identical to SEQ ID NO: 38671
  source 1..80: mol_type = other DNA

SEQ ID NO: 72649 - DNA, 80 bp, synthetic construct; identical to SEQ ID NO: 13548
  source 1..80: mol_type = other DNA

SEQ ID NO: 72650 - DNA, 80 bp, synthetic construct; identical to SEQ ID NO: 38673
  source 1..80: mol_type = other DNA

SEQ ID NO: 72651 - DNA, 80 bp, synthetic construct; identical to SEQ ID NO: 38674
  source 1..80: mol_type = other DNA

SEQ ID NO: 72652 - DNA, 80 bp, synthetic construct; identical to SEQ ID NO: 38675
  source 1..80: mol_type = other DNA

SEQ ID NO: 72653 - DNA, 80 bp, synthetic construct; identical to SEQ ID NO: 38676
  source 1..80: mol_type = other DNA

SEQ ID NO: 72654 - DNA, 80 bp, synthetic construct; identical to SEQ ID NO: 13549
  source 1..80: mol_type = other DNA

SEQ ID NO: 72655 - DNA, 80 bp, synthetic construct; identical to SEQ ID NO: 38678
  source 1..80: mol_type = other DNA

SEQ ID NO: 72656 - DNA, 80 bp, synthetic construct; identical to SEQ ID NO: 38679
  source 1..80: mol_type = other DNA

SEQ ID NO: 72657 - DNA, 80 bp, synthetic construct; identical to SEQ ID NO: 38680
  source 1..80: mol_type = other DNA

SEQ ID NO: 72658 - DNA, 80 bp, synthetic construct; identical to SEQ ID NO: 13550
  source 1..80: mol_type = other DNA

SEQ ID NO: 72659 - DNA, 80 bp, synthetic construct; identical to SEQ ID NO: 38683
  source 1..80: mol_type = other DNA

SEQ ID NO: 72660 - DNA, 80 bp, synthetic construct; identical to SEQ ID NO: 13551
  source 1..80: mol_type = other DNA

SEQ ID NO: 72661 - DNA, 80 bp, synthetic construct; identical to SEQ ID NO: 38685
  source 1..80: mol_type = other DNA

SEQ ID NO: 72662 - DNA, 80 bp, synthetic construct; identical to SEQ ID NO: 38686
  source 1..80: mol_type = other DNA

SEQ ID NO: 72663 - DNA, 80 bp, synthetic construct; identical to SEQ ID NO: 38687
  source 1..80: mol_type = other DNA

SEQ ID NO: 72664 - DNA, 80 bp, synthetic construct; identical to SEQ ID NO: 13552
  source 1..80: mol_type = other DNA

SEQ ID NO: 72665 - DNA, 80 bp, synthetic construct; identical to SEQ ID NO: 38690
  source 1..80: mol_type = other DNA

SEQ ID NO: 72666 - DNA, 80 bp, synthetic construct; identical to SEQ ID NO: 38691
  source 1..80: mol_type = other DNA

SEQ ID NO: 72667 - DNA, 80 bp, synthetic construct; identical to SEQ ID NO: 38693
  source 1..80: mol_type = other DNA

SEQ ID NO: 72668 - DNA, 80 bp, synthetic construct; identical to SEQ ID NO: 13553
  source 1..80: mol_type = other DNA

SEQ ID NO: 72669 - DNA, 80 bp, synthetic construct; identical to SEQ ID NO: 38696
  source 1..80: mol_type = other DNA

SEQ ID NO: 72670 - DNA, 80 bp, synthetic construct; identical to SEQ ID NO: 38697
  source 1..80: mol_type = other DNA

SEQ ID NO: 72671 - DNA, 80 bp, synthetic construct; identical to SEQ ID NO: 13554
  source 1..80: mol_type = other DNA

SEQ ID NO: 72672 - DNA, 80 bp, synthetic construct; identical to SEQ ID NO: 38699
  source 1..80: mol_type = other DNA

SEQ ID NO: 72673 - DNA, 80 bp, synthetic construct; identical to SEQ ID NO: 38700
  source 1..80: mol_type = other DNA

SEQ ID NO: 72674 - DNA, 80 bp, synthetic construct; identical to SEQ ID NO: 38701
  source 1..80: mol_type = other DNA

SEQ ID NO: 72675 - DNA, 80 bp, synthetic construct; identical to SEQ ID NO: 13555
  source 1..80: mol_type = other DNA

SEQ ID NO: 72676 - DNA, 80 bp, synthetic construct; identical to SEQ ID NO: 38703
  source 1..80: mol_type = other DNA

SEQ ID NO: 72677 - DNA, 80 bp, synthetic construct; identical to SEQ ID NO: 38704
  source 1..80: mol_type = other DNA

SEQ ID NO: 72678 - DNA, 80 bp, synthetic construct; identical to SEQ ID NO: 13556
  source 1..80: mol_type = other DNA

SEQ ID NO: 72679 - DNA, 80 bp, synthetic construct; identical to SEQ ID NO: 38706
  source 1..80: mol_type = other DNA

SEQ ID NO: 72680 - DNA, 80 bp, synthetic construct; identical to SEQ ID NO: 38707
  source 1..80: mol_type = other DNA

SEQ ID NO: 72681 - DNA, 80 bp, synthetic construct; identical to SEQ ID NO: 38708
  source 1..80: mol_type = other DNA

SEQ ID NO: 72682 - DNA, 80 bp, synthetic construct; identical to SEQ ID NO: 38709
  source 1..80: mol_type = other DNA

SEQ ID NO: 72683 - DNA, 80 bp, synthetic construct; identical to SEQ ID NO: 13557
  source 1..80: mol_type = other DNA

SEQ ID NO: 72684 - DNA, 80 bp, synthetic construct; identical to SEQ ID NO: 38711
  source 1..80: mol_type = other DNA

SEQ ID NO: 72685 - DNA, 80 bp, synthetic construct; identical to SEQ ID NO: 38712
  source 1..80: mol_type = other DNA

SEQ ID NO: 72686 - DNA, 80 bp, synthetic construct; identical to SEQ ID NO: 13558
  source 1..80: mol_type = other DNA

SEQ ID NO: 72687 - DNA, 80 bp, synthetic construct; identical to SEQ ID NO: 38714
  source 1..80: mol_type = other DNA

SEQ ID NO: 72688 - DNA, 80 bp, synthetic construct; identical to SEQ ID NO: 38715
  source 1..80: mol_type = other DNA

SEQ ID NO: 72689 - DNA, 80 bp, synthetic construct; identical to SEQ ID NO: 38716
  source 1..80: mol_type = other DNA

SEQ ID NO: 72690 - DNA, 80 bp, synthetic construct; identical to SEQ ID NO: 13559
  source 1..80: mol_type = other DNA

SEQ ID NO: 72691 - DNA, 80 bp, synthetic construct; identical to SEQ ID NO: 38718
  source 1..80: mol_type = other DNA

SEQ ID NO: 72692 - DNA, 80 bp, synthetic construct; identical to SEQ ID NO: 38719
  source 1..80: mol_type = other DNA

SEQ ID NO: 72693 - DNA, 80 bp, synthetic construct; identical to SEQ ID NO: 38720
  source 1..80: mol_type = other DNA

SEQ ID NO: 72694 - DNA, 80 bp, synthetic construct; identical to SEQ ID NO: 13560
  source 1..80: mol_type = other DNA

SEQ ID NO: 72695 - DNA, 80 bp, synthetic construct; identical to SEQ ID NO: 38722
  source 1..80: mol_type = other DNA

SEQ ID NO: 72696 - DNA, 80 bp, synthetic construct; identical to SEQ ID NO: 38723
  source 1..80: mol_type = other DNA

SEQ ID NO: 72697 - DNA, 80 bp, synthetic construct; identical to SEQ ID NO: 38724
  source 1..80: mol_type = other DNA

SEQ ID NO: 72698 - DNA, 80 bp, synthetic construct; identical to SEQ ID NO: 13561
  source 1..80: mol_type = other DNA

SEQ ID NO: 72699 - DNA, 80 bp, synthetic construct; identical to SEQ ID NO: 38726
  source 1..80: mol_type = other DNA

SEQ ID NO: 72700 - DNA, 80 bp, synthetic construct; identical to SEQ ID NO: 38727
  source 1..80: mol_type = other DNA

SEQ ID NO: 72701 - DNA, 80 bp, synthetic construct; identical to SEQ ID NO: 38728
  source 1..80: mol_type = other DNA

SEQ ID NO: 72702 - DNA, 80 bp, synthetic construct; identical to SEQ ID NO: 38729
  source 1..80: mol_type = other DNA

SEQ ID NO: 72703 - DNA, 80 bp, synthetic construct; identical to SEQ ID NO: 13562
  source 1..80: mol_type = other DNA

SEQ ID NO: 72704 - DNA, 80 bp, synthetic construct; identical to SEQ ID NO: 38731
  source 1..80: mol_type = other DNA

SEQ ID NO: 72705 - DNA, 80 bp, synthetic construct; identical to SEQ ID NO: 38732
  source 1..80: mol_type = other DNA

SEQ ID NO: 72706 - DNA, 80 bp, synthetic construct; identical to SEQ ID NO: 38733
  source 1..80: mol_type = other DNA

SEQ ID NO: 72707 - DNA, 80 bp, synthetic construct; identical to SEQ ID NO: 13563
  source 1..80: mol_type = other DNA

SEQ ID NO: 72708 - DNA, 80 bp, synthetic construct; identical to SEQ ID NO: 38735
  source 1..80: mol_type = other DNA

SEQ ID NO: 72709 - DNA, 80 bp, synthetic construct; identical to SEQ ID NO: 38736
  source 1..80: mol_type = other DNA

SEQ ID NO: 72710 - DNA, 80 bp, synthetic construct; identical to SEQ ID NO: 13564
  source 1..80: mol_type = other DNA

SEQ ID NO: 72711 - DNA, 80 bp, synthetic construct; identical to SEQ ID NO: 38739
  source 1..80: mol_type = other DNA

SEQ ID NO: 72712 - DNA, 80 bp, synthetic construct; identical to SEQ ID NO: 38740
  source 1..80: mol_type = other DNA

SEQ ID NO: 72713 - DNA, 80 bp, synthetic construct; identical to SEQ ID NO: 13565
  source 1..80: mol_type = other DNA

SEQ ID NO: 72714 - DNA, 80 bp, synthetic construct; identical to SEQ ID NO: 38742
  source 1..80: mol_type = other DNA

SEQ ID NO: 72715 - DNA, 80 bp, synthetic construct; identical to SEQ ID NO: 38743
  source 1..80: mol_type = other DNA

SEQ ID NO: 72716 - DNA, 80 bp, synthetic construct; identical to SEQ ID NO: 38744
  source 1..80: mol_type = other DNA

SEQ ID NO: 72717 - DNA, 80 bp, synthetic construct; identical to SEQ ID NO: 13566
  source 1..80: mol_type = other DNA

SEQ ID NO: 72718 - DNA, 80 bp, synthetic construct; identical to SEQ ID NO: 38746
  source 1..80: mol_type = other DNA

SEQ ID NO: 72719 - DNA, 80 bp, synthetic construct; identical to SEQ ID NO: 38747
  source 1..80: mol_type = other DNA

SEQ ID NO: 72720 - DNA, 80 bp, synthetic construct; identical to SEQ ID NO: 38748
  source 1..80: mol_type = other DNA

SEQ ID NO: 72721 - DNA, 80 bp, synthetic construct; identical to SEQ ID NO: 13567
  source 1..80: mol_type = other DNA

SEQ ID NO: 72722 - DNA, 80 bp, synthetic construct; identical to SEQ ID NO: 38750
  source 1..80: mol_type = other DNA

SEQ ID NO: 72723 - DNA, 80 bp, synthetic construct; identical to SEQ ID NO: 38752
  source 1..80: mol_type = other DNA

SEQ ID NO: 72724 - DNA, 80 bp, synthetic construct; identical to SEQ ID NO: 13568
  source 1..80: mol_type = other DNA

SEQ ID NO: 72725 - DNA, 80 bp, synthetic construct; identical to SEQ ID NO: 38755
  source 1..80: mol_type = other DNA

SEQ ID NO: 72726 - DNA, 80 bp, synthetic construct; identical to SEQ ID NO: 38756
  source 1..80: mol_type = other DNA

SEQ ID NO: 72727 - DNA, 80 bp, synthetic construct; identical to SEQ ID NO: 38757
  source 1..80: mol_type = other DNA

SEQ ID NO: 72728 - DNA, 80 bp, synthetic construct; identical to SEQ ID NO: 13569
  source 1..80: mol_type = other DNA

SEQ ID NO: 72729 - DNA, 80 bp, synthetic construct; identical to SEQ ID NO: 38759
  source 1..80: mol_type = other DNA

SEQ ID NO: 72730 - DNA, 80 bp, synthetic construct; identical to SEQ ID NO: 38760
  source 1..80: mol_type = other DNA

SEQ ID NO: 72731 - DNA, 80 bp, synthetic construct; identical to SEQ ID NO: 38761
  source 1..80: mol_type = other DNA

SEQ ID NO: 72732 - DNA, 80 bp, synthetic construct; identical to SEQ ID NO: 13570
  source 1..80: mol_type = other DNA

SEQ ID NO: 72733 - DNA, 80 bp, synthetic construct; identical to SEQ ID NO: 38763
  source 1..80: mol_type = other DNA

SEQ ID NO: 72734 - DNA, 80 bp, synthetic construct; identical to SEQ ID NO: 38764
  source 1..80: mol_type = other DNA

SEQ ID NO: 72735 - DNA, 80 bp, synthetic construct; identical to SEQ ID NO: 13571
  source 1..80: mol_type = other DNA

SEQ ID NO: 72736 - DNA, 80 bp, synthetic construct; identical to SEQ ID NO: 38766
  source 1..80: mol_type = other DNA

SEQ ID NO: 72737 - DNA, 80 bp, synthetic construct; identical to SEQ ID NO: 38767
  source 1..80: mol_type = other DNA

SEQ ID NO: 72738 - DNA, 80 bp, synthetic construct; identical to SEQ ID NO: 38768
  source 1..80: mol_type = other DNA

SEQ ID NO: 72739 - DNA, 80 bp, synthetic construct; identical to SEQ ID NO: 38769
  source 1..80: mol_type = other DNA

SEQ ID NO: 72740 - DNA, 80 bp, synthetic construct; identical to SEQ ID NO: 13572
  source 1..80: mol_type = other DNA

SEQ ID NO: 72741 - DNA, 80 bp, synthetic construct; identical to SEQ ID NO: 38771
  source 1..80: mol_type = other DNA

SEQ ID NO: 72742 - DNA, 80 bp, synthetic construct; identical to SEQ ID NO: 38772
  source 1..80: mol_type = other DNA

SEQ ID NO: 72743 - DNA, 80 bp, synthetic construct; identical to SEQ ID NO: 13573
  source 1..80: mol_type = other DNA

SEQ ID NO: 72744 - DNA, 80 bp, synthetic construct; identical to SEQ ID NO: 38775
  source 1..80: mol_type = other DNA

SEQ ID NO: 72745 - DNA, 80 bp, synthetic construct; identical to SEQ ID NO: 38776
  source 1..80: mol_type = other DNA

SEQ ID NO: 72746 - DNA, 80 bp, synthetic construct; identical to SEQ ID NO: 13574
  source 1..80: mol_type = other DNA

SEQ ID NO: 72747 - DNA, 80 bp, synthetic construct; identical to SEQ ID NO: 38778
  source 1..80: mol_type = other DNA

SEQ ID NO: 72748 - DNA, 80 bp, synthetic construct; identical to SEQ ID NO: 38779
  source 1..80: mol_type = other DNA

SEQ ID NO: 72749 - DNA, 80 bp, synthetic construct; identical to SEQ ID NO: 38780
  source 1..80: mol_type = other DNA

SEQ ID NO: 72750 - DNA, 80 bp, synthetic construct; identical to SEQ ID NO: 38781
  source 1..80: mol_type = other DNA

SEQ ID NO: 72751 - DNA, 80 bp, synthetic construct; identical to SEQ ID NO: 13575
  source 1..80: mol_type = other DNA

SEQ ID NO: 72752 - DNA, 80 bp, synthetic construct; identical to SEQ ID NO: 38783
  source 1..80: mol_type = other DNA

SEQ ID NO: 72753 - DNA, 80 bp, synthetic construct; identical to SEQ ID NO: 38784
  source 1..80: mol_type = other DNA

SEQ ID NO: 72754 - DNA, 80 bp, synthetic construct; identical to SEQ ID NO: 38785
  source 1..80: mol_type = other DNA

SEQ ID NO: 72755 - DNA, 80 bp, synthetic construct; identical to SEQ ID NO: 13576
  source 1..80: mol_type = other DNA

SEQ ID NO: 72756 - DNA, 80 bp, synthetic construct; identical to SEQ ID NO: 38788
  source 1..80: mol_type = other DNA

SEQ ID NO: 72757 - DNA, 80 bp, synthetic construct; identical to SEQ ID NO: 38789
  source 1..80: mol_type = other DNA

SEQ ID NO: 72758 - DNA, 80 bp, synthetic construct; identical to SEQ ID NO: 38790
  source 1..80: mol_type = other DNA

SEQ ID NO: 72759 - DNA, 80 bp, synthetic construct; identical to SEQ ID NO: 13577
  source 1..80: mol_type = other DNA

SEQ ID NO: 72760 - DNA, 80 bp, synthetic construct; identical to SEQ ID NO: 38792
  source 1..80: mol_type = other DNA

SEQ ID NO: 72761 - DNA, 80 bp, synthetic construct; identical to SEQ ID NO: 38793
  source 1..80: mol_type = other DNA

SEQ ID NO: 72762 - DNA, 80 bp, synthetic construct; identical to SEQ ID NO: 13578
  source 1..80: mol_type = other DNA

SEQ ID NO: 72763 - DNA, 80 bp, synthetic construct; identical to SEQ ID NO: 38795
  source 1..80: mol_type = other DNA

SEQ ID NO: 72764 - DNA, 80 bp, synthetic construct; identical to SEQ ID NO: 38796
  source 1..80: mol_type = other DNA

SEQ ID NO: 72765 - DNA, 80 bp, synthetic construct; identical to SEQ ID NO: 38797
  source 1..80: mol_type = other DNA

SEQ ID NO: 72766 - DNA, 80 bp, synthetic construct; identical to SEQ ID NO: 38798
  source 1..80: mol_type = other DNA

SEQ ID NO: 72767 - DNA, 80 bp, synthetic construct; identical to SEQ ID NO: 13579
  source 1..80: mol_type = other DNA

SEQ ID NO: 72768 - DNA, 80 bp, synthetic construct; identical to SEQ ID NO: 38800
  source 1..80: mol_type = other DNA

SEQ ID NO: 72769 - DNA, 80 bp, synthetic construct; identical to SEQ ID NO: 38801
  source 1..80: mol_type = other DNA

SEQ ID NO: 72770 - DNA, 80 bp, synthetic construct; identical to SEQ ID NO: 38802
  source 1..80: mol_type = other DNA

SEQ ID NO: 72771 - DNA, 80 bp, synthetic construct; identical to SEQ ID NO: 38803
  source 1..80: mol_type = other DNA

SEQ ID NO: 72772 - DNA, 80 bp, synthetic construct; identical to SEQ ID NO: 13580
  source 1..80: mol_type = other DNA

SEQ ID NO: 72773 - DNA, 80 bp, synthetic construct; identical to SEQ ID NO: 38805
  source 1..80: mol_type = other DNA

SEQ ID NO: 72774 - DNA, 80 bp, synthetic construct; identical to SEQ ID NO: 38806
  source 1..80: mol_type = other DNA

SEQ ID NO: 72775 - DNA, 80 bp, synthetic construct; identical to SEQ ID NO: 38807
  source 1..80: mol_type = other DNA

SEQ ID NO: 72776 - DNA, 80 bp, synthetic construct; identical to SEQ ID NO: 13581
  source 1..80: mol_type = other DNA

SEQ ID NO: 72777 - DNA, 80 bp, synthetic construct; identical to SEQ ID NO: 38809
  source 1..80: mol_type = other DNA

SEQ ID NO: 72778 - DNA, 80 bp, synthetic construct; identical to SEQ ID NO: 38810
  source 1..80: mol_type = other DNA

SEQ ID NO: 72779 - DNA, 80 bp, synthetic construct; identical to SEQ ID NO: 38811
  source 1..80: mol_type = other DNA

SEQ ID NO: 72780 - DNA, 80 bp, synthetic construct; identical to SEQ ID NO: 13582
  source 1..80: mol_type = other DNA

SEQ ID NO: 72781 - DNA, 80 bp, synthetic construct; identical to SEQ ID NO: 38813
  source 1..80: mol_type = other DNA

SEQ ID NO: 72782 - DNA, 80 bp, synthetic construct; identical to SEQ ID NO: 13583
  source 1..80: mol_type = other DNA

SEQ ID NO: 72783 - DNA, 80 bp, synthetic construct; identical to SEQ ID NO: 38816
  source 1..80: mol_type = other DNA

SEQ ID NO: 72784 - DNA, 80 bp, synthetic construct; identical to SEQ ID NO: 38817
  source 1..80: mol_type = other DNA

SEQ ID NO: 72785 - DNA, 80 bp, synthetic construct; identical to SEQ ID NO: 38818
  source 1..80: mol_type = other DNA

SEQ ID NO: 72786 - DNA, 80 bp, synthetic construct; identical to SEQ ID NO: 13584
  source 1..80: mol_type = other DNA

SEQ ID NO: 72787 - DNA, 80 bp, synthetic construct; identical to SEQ ID NO: 38820
  source 1..80: mol_type = other DNA

SEQ ID NO: 72788 - DNA, 80 bp, synthetic construct; identical to SEQ ID NO: 38821
  source 1..80: mol_type = other DNA

SEQ ID NO: 72789 - DNA, 80 bp, synthetic construct; identical to SEQ ID NO: 38822
  source 1..80: mol_type = other DNA

SEQ ID NO: 72790 - DNA, 80 bp, synthetic construct; identical to SEQ ID NO: 38823
  source 1..80: mol_type = other DNA

SEQ ID NO: 72791 - DNA, 80 bp, synthetic construct; identical to SEQ ID NO: 13585
  source 1..80: mol_type = other DNA

SEQ ID NO: 72792 - DNA, 80 bp, synthetic construct; identical to SEQ ID NO: 38825
  source 1..80: mol_type = other DNA

SEQ ID NO: 72793 - DNA, 80 bp, synthetic construct; identical to SEQ ID NO: 38826
  source 1..80: mol_type = other DNA

SEQ ID NO: 72794 - DNA, 80 bp, synthetic construct; identical to SEQ ID NO: 38827
  source 1..80: mol_type = other DNA

SEQ ID NO: 72795 - DNA, 80 bp, synthetic construct; identical to SEQ ID NO: 38828
  source 1..80: mol_type = other DNA

SEQ ID NO: 72796 - DNA, 80 bp, synthetic construct; identical to SEQ ID NO: 13586
  source 1..80: mol_type = other DNA

SEQ ID NO: 72797 - DNA, 80 bp, synthetic construct; identical to SEQ ID NO: 38830
  source 1..80: mol_type = other DNA

SEQ ID NO: 72798 - DNA, 80 bp, synthetic construct; identical to SEQ ID NO: 38831
  source 1..80: mol_type = other DNA

SEQ ID NO: 72799 - DNA, 80 bp, synthetic construct; identical to SEQ ID NO: 38832
  source 1..80: mol_type = other DNA

SEQ ID NO: 72800 - DNA, 80 bp, synthetic construct; identical to SEQ ID NO: 13587
  source 1..80: mol_type = other DNA

SEQ ID NO: 72801 - DNA, 80 bp, synthetic construct; identical to SEQ ID NO: 38834
  source 1..80: mol_type = other DNA

SEQ ID NO: 72802 - DNA, 80 bp, synthetic construct; identical to SEQ ID NO: 38835
  source 1..80: mol_type = other DNA

SEQ ID NO: 72803 - DNA, 80 bp, synthetic construct; identical to SEQ ID NO: 38836
  source 1..80: mol_type = other DNA

SEQ ID NO: 72804 - DNA, 80 bp, synthetic construct; identical to SEQ ID NO: 13588
  source 1..80: mol_type = other DNA

SEQ ID NO: 72805 - DNA, 80 bp, synthetic construct; identical to SEQ ID NO: 38839
  source 1..80: mol_type = other DNA

SEQ ID NO: 72806 - DNA, 80 bp, synthetic construct; identical to SEQ ID NO: 38840
  source 1..80: mol_type = other DNA

SEQ ID NO: 72807 - DNA, 80 bp, synthetic construct; identical to SEQ ID NO: 38841
  source 1..80: mol_type = other DNA

SEQ ID NO: 72808 - DNA, 80 bp, synthetic construct; identical to SEQ ID NO: 13589
  source 1..80: mol_type = other DNA

SEQ ID NO: 72809 - DNA, 80 bp, synthetic construct; identical to SEQ ID NO: 38843
  source 1..80: mol_type = other DNA

SEQ ID NO: 72810 - DNA, 80 bp, synthetic construct; identical to SEQ ID NO: 38844
  source 1..80: mol_type = other DNA

SEQ ID NO: 72811 - DNA, 80 bp, synthetic construct; identical to SEQ ID NO: 38845
  source 1..80: mol_type = other DNA

SEQ ID NO: 72812 - DNA, 80 bp, synthetic construct; identical to SEQ ID NO: 13590
  source 1..80: mol_type = other DNA

SEQ ID NO: 72813 - DNA, 80 bp, synthetic construct; identical to SEQ ID NO: 38847
  source 1..80: mol_type = other DNA

SEQ ID NO: 72814 - DNA, 80 bp, synthetic construct; identical to SEQ ID NO: 38848
  source 1..80: mol_type = other DNA

SEQ ID NO: 72815 - DNA, 80 bp, synthetic construct; identical to SEQ ID NO: 38849
  source 1..80: mol_type = other DNA

SEQ ID NO: 72816 - DNA, 80 bp, synthetic construct; identical to SEQ ID NO: 13591
  source 1..80: mol_type = other DNA

SEQ ID NO: 72817 - DNA, 80 bp, synthetic construct; identical to SEQ ID NO: 38851
  source 1..80: mol_type = other DNA

SEQ ID NO: 72818 - DNA, 80 bp, synthetic construct; identical to SEQ ID NO: 38852
  source 1..80: mol_type = other DNA

SEQ ID NO: 72819 - DNA, 80 bp, synthetic construct; identical to SEQ ID NO: 13592
  source 1..80: mol_type = other DNA

SEQ ID NO: 72820 - DNA, 80 bp, synthetic construct; identical to SEQ ID NO: 38854
  source 1..80: mol_type = other DNA

SEQ ID NO: 72821 - DNA, 80 bp, synthetic construct; identical to SEQ ID NO: 38855
  source 1..80: mol_type = other DNA

SEQ ID NO: 72822 - DNA, 80 bp, synthetic construct; identical to SEQ ID NO: 38856
  source 1..80: mol_type = other DNA

SEQ ID NO: 72823 - DNA, 80 bp, synthetic construct; identical to SEQ ID NO: 38857
  source 1..80: mol_type = other DNA

SEQ ID NO: 72824 - DNA, 80 bp, synthetic construct; identical to SEQ ID NO: 13593
  source 1..80: mol_type = other DNA

SEQ ID NO: 72825 - DNA, 80 bp, synthetic construct; identical to SEQ ID NO: 38859
  source 1..80: mol_type = other DNA

SEQ ID NO: 72826 - DNA, 80 bp, synthetic construct; identical to SEQ ID NO: 38860
  source 1..80: mol_type = other DNA

SEQ ID NO: 72827 - DNA, 80 bp, synthetic construct; identical to SEQ ID NO: 13594
  source 1..80: mol_type = other DNA

SEQ ID NO: 72828 - DNA, 80 bp, synthetic construct; identical to SEQ ID NO: 38862
  source 1..80: mol_type = other DNA

SEQ ID NO: 72829 - DNA, 80 bp, synthetic construct; identical to SEQ ID NO: 38863
  source 1..80: mol_type = other DNA

SEQ ID NO: 72830 - DNA, 80 bp, synthetic construct; identical to SEQ ID NO: 38864
  source 1..80: mol_type = other DNA

SEQ ID NO: 72831 - DNA, 80 bp, synthetic construct; identical to SEQ ID NO: 38865
  source 1..80: mol_type = other DNA

SEQ ID NO: 72832 - DNA, 80 bp, synthetic construct; identical to SEQ ID NO: 13595
  source 1..80: mol_type = other DNA

SEQ ID NO: 72833 - DNA, 80 bp, synthetic construct; identical to SEQ ID NO: 38867
  source 1..80: mol_type = other DNA

SEQ ID NO: 72834 - DNA, 80 bp, synthetic construct; identical to SEQ ID NO: 38868
  source 1..80: mol_type = other DNA

SEQ ID NO: 72835 - DNA, 80 bp, synthetic construct; identical to SEQ ID NO: 38870
  source 1..80: mol_type = other DNA

SEQ ID NO: 72836 - DNA, 80 bp, synthetic construct; identical to SEQ ID NO: 13596
  source 1..80: mol_type = other DNA

SEQ ID NO: 72837 - DNA, 80 bp, synthetic construct; identical to SEQ ID NO: 38872
  source 1..80: mol_type = other DNA

SEQ ID NO: 72838 - DNA, 80 bp, synthetic construct; identical to SEQ ID NO: 38873
  source 1..80: mol_type = other DNA

SEQ ID NO: 72839 - DNA, 80 bp, synthetic construct; identical to SEQ ID NO: 38874
  source 1..80: mol_type = other DNA

SEQ ID NO: 72840 - DNA, 80 bp, synthetic construct; identical to SEQ ID NO: 13597
  source 1..80: mol_type = other DNA

SEQ ID NO: 72841 - DNA, 80 bp, synthetic construct; identical to SEQ ID NO: 38876
  source 1..80: mol_type = other DNA

SEQ ID NO: 72842 - DNA, 80 bp, synthetic construct; identical to SEQ ID NO: 38877
  source 1..80: mol_type = other DNA

SEQ ID NO: 72843 - DNA, 80 bp, synthetic construct; identical to SEQ ID NO: 38878
  source 1..80: mol_type = other DNA

SEQ ID NO: 72844 - DNA, 80 bp, synthetic construct; identical to SEQ ID NO: 13598
  source 1..80: mol_type = other DNA

SEQ ID NO: 72845 - DNA, 80 bp, synthetic construct; identical to SEQ ID NO: 38880
  source 1..80: mol_type = other DNA

SEQ ID NO: 72846 - DNA, 80 bp, synthetic construct; identical to SEQ ID NO: 38881
  source 1..80: mol_type = other DNA

SEQ ID NO: 72847 - DNA, 80 bp, synthetic construct; identical to SEQ ID NO: 13599
  source 1..80: mol_type = other DNA

SEQ ID NO: 72848 - DNA, 80 bp, synthetic construct; identical to SEQ ID NO: 38884
  source 1..80: mol_type = other DNA

SEQ ID NO: 72849 - DNA, 80 bp, synthetic construct; identical to SEQ ID NO: 38885
  source 1..80: mol_type = other DNA

SEQ ID NO: 72850 - DNA, 80 bp, synthetic construct; identical to SEQ ID NO: 13600
  source 1..80: mol_type = other DNA

SEQ ID NO: 72851 - DNA, 80 bp, synthetic construct; identical to SEQ ID NO: 38887
  source 1..80: mol_type = other DNA

SEQ ID NO: 72852 - DNA, 80 bp, synthetic construct; identical to SEQ ID NO: 38888
  source 1..80: mol_type = other DNA

SEQ ID NO: 72853 - DNA, 80 bp, synthetic construct; identical to SEQ ID NO: 38889
  source 1..80: mol_type = other DNA

SEQ ID NO: 72854 - DNA, 80 bp, synthetic construct; identical to SEQ ID NO: 13601
  source 1..80: mol_type = other DNA

SEQ ID NO: 72855 - DNA, 80 bp, synthetic construct; identical to SEQ ID NO: 38891
  source 1..80: mol_type = other DNA

SEQ ID NO: 72856 - DNA, 80 bp, synthetic construct; identical to SEQ ID NO: 38892
  source 1..80: mol_type = other DNA

SEQ ID NO: 72857 - DNA, 80 bp, synthetic construct; identical to SEQ ID NO: 38893
  source 1..80: mol_type = other DNA

SEQ ID NO: 72858 - DNA, 80 bp, synthetic construct; identical to SEQ ID NO: 13602
  source 1..80: mol_type = other DNA

SEQ ID NO: 72859 - DNA, 80 bp, synthetic construct; identical to SEQ ID NO: 38895
  source 1..80: mol_type = other DNA

SEQ ID NO: 72860 - DNA, 80 bp, synthetic construct; identical to SEQ ID NO: 38896
  source 1..80: mol_type = other DNA

SEQ ID NO: 72861 - DNA, 80 bp, synthetic construct; identical to SEQ ID NO: 38897
  source 1..80: mol_type = other DNA

SEQ ID NO: 72862 - DNA, 80 bp, synthetic construct; identical to SEQ ID NO: 13603
  source 1..80: mol_type = other DNA

SEQ ID NO: 72863 - DNA, 80 bp, synthetic construct; identical to SEQ ID NO: 38899
  source 1..80: mol_type = other DNA

SEQ ID NO: 72864 - DNA, 80 bp, synthetic construct; identical to SEQ ID NO: 38900
  source 1..80: mol_type = other DNA

SEQ ID NO: 72865 - DNA, 80 bp, synthetic construct; identical to SEQ ID NO: 38901
  source 1..80: mol_type = other DNA

SEQ ID NO: 72866 - DNA, 80 bp, synthetic construct; identical to SEQ ID NO: 13604
  source 1..80: mol_type = other DNA

SEQ ID NO: 72867 - DNA, 80 bp, synthetic construct; identical to SEQ ID NO: 38903
  source 1..80: mol_type = other DNA

SEQ ID NO: 72868 - DNA, 80 bp, synthetic construct; identical to SEQ ID NO: 38904
  source 1..80: mol_type = other DNA

SEQ ID NO: 72869 - DNA, 80 bp, synthetic construct; identical to SEQ ID NO: 38905
  source 1..80: mol_type = other DNA

SEQ ID NO: 72870 - DNA, 80 bp, synthetic construct; identical to SEQ ID NO: 38906
  source 1..80: mol_type = other DNA

SEQ ID NO: 72871 - DNA, 80 bp, synthetic construct; identical to SEQ ID NO: 13605
  source 1..80: mol_type = other DNA

SEQ ID NO: 72872 - DNA, 80 bp, synthetic construct; identical to SEQ ID NO: 38908
  source 1..80: mol_type = other DNA

SEQ ID NO: 72873 - DNA, 80 bp, synthetic construct; identical to SEQ ID NO: 38909
  source 1..80: mol_type = other DNA

SEQ ID NO: 72874 - DNA, 80 bp, synthetic construct; identical to SEQ ID NO: 38910
  source 1..80: mol_type = other DNA

SEQ ID NO: 72875 - DNA, 80 bp, synthetic construct; identical to SEQ ID NO: 13606
  source 1..80: mol_type = other DNA

SEQ ID NO: 72876 - DNA, 80 bp, synthetic construct; identical to SEQ ID NO: 38912
  source 1..80: mol_type = other DNA

SEQ ID NO: 72877 - DNA, 80 bp, synthetic construct; identical to SEQ ID NO: 38913
  source 1..80: mol_type = other DNA

SEQ ID NO: 72878 - DNA, 80 bp, synthetic construct; identical to SEQ ID NO: 13607
  source 1..80: mol_type = other DNA

SEQ ID NO: 72879 - DNA, 80 bp, synthetic construct; identical to SEQ ID NO: 38915
  source 1..80: mol_type = other DNA

SEQ ID NO: 72880 - DNA, 80 bp, synthetic construct; identical to SEQ ID NO: 38916
  source 1..80: mol_type = other DNA

SEQ ID NO: 72881 - DNA, 80 bp, synthetic construct; identical to SEQ ID NO: 38917
  source 1..80: mol_type = other DNA

SEQ ID NO: 72882 - DNA, 80 bp, synthetic construct; identical to SEQ ID NO: 13608
  source 1..80: mol_type = other DNA

SEQ ID NO: 72883 - DNA, 80 bp, synthetic construct; identical to SEQ ID NO: 38919
  source 1..80: mol_type = other DNA

SEQ ID NO: 72884 - DNA, 80 bp, synthetic construct; identical to SEQ ID NO: 38920
  source 1..80: mol_type = other DNA

SEQ ID NO: 72885 - DNA, 80 bp, synthetic construct; identical to SEQ ID NO: 38921
  source 1..80: mol_type = other DNA

SEQ ID NO: 72886 - DNA, 80 bp, synthetic construct; identical to SEQ ID NO: 13609
  source 1..80: mol_type = other DNA

SEQ ID NO: 72887 - DNA, 80 bp, synthetic construct; identical to SEQ ID NO: 38923
  source 1..80: mol_type = other DNA

SEQ ID NO: 72888 - DNA, 80 bp, synthetic construct; identical to SEQ ID NO: 38924
  source 1..80: mol_type = other DNA

SEQ ID NO: 72889 - DNA, 80 bp, synthetic construct; identical to SEQ ID NO: 38925
  source 1..80: mol_type = other DNA

SEQ ID NO: 72890 - DNA, 80 bp, synthetic construct; identical to SEQ ID NO: 38926
  source 1..80: mol_type = other DNA

SEQ ID NO: 72891 - DNA, 80 bp, synthetic construct; identical to SEQ ID NO: 13610
  source 1..80: mol_type = other DNA

SEQ ID NO: 72892 - DNA, 80 bp, synthetic construct; identical to SEQ ID NO: 38928
  source 1..80: mol_type = other DNA

SEQ ID NO: 72893 - DNA, 80 bp, synthetic construct; identical to SEQ ID NO: 38929
  source 1..80: mol_type = other DNA

SEQ ID NO: 72894 - DNA, 80 bp, synthetic construct; identical to SEQ ID NO: 13611
  source 1..80: mol_type = other DNA

SEQ ID NO: 72895 - DNA, 80 bp, synthetic construct; identical to SEQ ID NO: 38931
  source 1..80: mol_type = other DNA

SEQ ID NO: 72896 - DNA, 80 bp, synthetic construct; identical to SEQ ID NO: 38932
  source 1..80: mol_type = other DNA

SEQ ID NO: 72897 - DNA, 80 bp, synthetic construct; identical to SEQ ID NO: 38934
  source 1..80: mol_type = other DNA

SEQ ID NO: 72898 - DNA, 80 bp, synthetic construct; identical to SEQ ID NO: 13612
  source 1..80: mol_type = other DNA

SEQ ID NO: 72899 - DNA, 80 bp, synthetic construct; identical to SEQ ID NO: 38936
  source 1..80: mol_type = other DNA

SEQ ID NO: 72900 - DNA, 80 bp, synthetic construct; identical to SEQ ID NO: 38937
  source 1..80: mol_type = other DNA

SEQ ID NO: 72901 - DNA, 80 bp, synthetic construct; identical to SEQ ID NO: 13613
  source 1..80: mol_type = other DNA

SEQ ID NO: 72902 - DNA, 80 bp, synthetic construct; identical to SEQ ID NO: 38940
  source 1..80: mol_type = other DNA

SEQ ID NO: 72903 - DNA, 80 bp, synthetic construct; identical to SEQ ID NO: 13614
  source 1..80: mol_type = other DNA

SEQ ID NO: 72904 - DNA, 80 bp, synthetic construct; identical to SEQ ID NO: 38943
  source 1..80: mol_type = other DNA

SEQ ID NO: 72905 - DNA, 80 bp, synthetic construct; identical to SEQ ID NO: 38944
  source 1..80: mol_type = other DNA

SEQ ID NO: 72906 - DNA, 80 bp, synthetic construct; identical to SEQ ID NO: 38945
  source 1..80: mol_type = other DNA

SEQ ID NO: 72907 - DNA, 80 bp, synthetic construct; identical to SEQ ID NO: 13615
  source 1..80: mol_type = other DNA

SEQ ID NO: 72908 - DNA, 80 bp, synthetic construct; identical to SEQ ID NO: 38947
  source 1..80: mol_type = other DNA

SEQ ID NO: 72909 - DNA, 80 bp, synthetic construct; identical to SEQ ID NO: 38948
  source 1..80: mol_type = other DNA

SEQ ID NO: 72910 - DNA, 80 bp, synthetic construct; identical to SEQ ID NO: 38949
  source 1..80: mol_type = other DNA

SEQ ID NO: 72911 - DNA, 80 bp, synthetic construct; identical to SEQ ID NO: 13616
  source 1..80: mol_type = other DNA

SEQ ID NO: 72912 - DNA, 80 bp, synthetic construct; identical to SEQ ID NO: 38952
  source 1..80: mol_type = other DNA

SEQ ID NO: 72913 - DNA, 80 bp, synthetic construct; identical to SEQ ID NO: 38953
  source 1..80: mol_type = other DNA

SEQ ID NO: 72914 - DNA, 80 bp, synthetic construct; identical to SEQ ID NO: 38955
  source 1..80: mol_type = other DNA

SEQ ID NO: 72915 - DNA, 80 bp, synthetic construct; identical to SEQ ID NO: 38956
  source 1..80: mol_type = other DNA

SEQ ID NO: 72916 - DNA, 80 bp, synthetic construct; identical to SEQ ID NO: 38957
  source 1..80: mol_type = other DNA

SEQ ID NO: 72917 - DNA, 80 bp, synthetic construct; identical to SEQ ID NO: 38958
  source 1..80: mol_type = other DNA

SEQ ID NO: 72918 - DNA, 80 bp, synthetic construct; identical to SEQ ID NO: 13618
  source 1..80: mol_type = other DNA

SEQ ID NO: 72919 - DNA, 80 bp, synthetic construct; identical to SEQ ID NO: 38960
  source 1..80: mol_type = other DNA

SEQ ID NO: 72920 - DNA, 80 bp, synthetic construct; identical to SEQ ID NO: 38961
  source 1..80: mol_type = other DNA

SEQ ID NO: 72921 - DNA, 80 bp, synthetic construct; identical to SEQ ID NO: 38962
  source 1..80: mol_type = other DNA

SEQ ID NO: 72922 - DNA, 80 bp, synthetic construct; identical to SEQ ID NO: 13619
  source 1..80: mol_type = other DNA

SEQ ID NO: 72923 - DNA, 80 bp, synthetic construct; identical to SEQ ID NO: 38964
  source 1..80: mol_type = other DNA

SEQ ID NO: 72924 - DNA, 80 bp, synthetic construct; identical to SEQ ID NO: 38965
  source 1..80: mol_type = other DNA

SEQ ID NO: 72925 - DNA, 80 bp, synthetic construct; identical to SEQ ID NO: 13620
  source 1..80: mol_type = other DNA

SEQ ID NO: 72926 - DNA, 80 bp, synthetic construct; identical to SEQ ID NO: 38967
  source 1..80: mol_type = other DNA

SEQ ID NO: 72927 - DNA, 80 bp, synthetic construct; identical to SEQ ID NO: 38968
  source 1..80: mol_type = other DNA

SEQ ID NO: 72928 - DNA, 80 bp, synthetic construct; identical to SEQ ID NO: 38969
  source 1..80: mol_type = other DNA

SEQ ID NO: 72929 - DNA, 80 bp, synthetic construct; identical to SEQ ID NO: 38970
  source 1..80: mol_type = other DNA

SEQ ID NO: 72930 - DNA, 80 bp, synthetic construct; identical to SEQ ID NO: 13621
  source 1..80: mol_type = other DNA

SEQ ID NO: 72931 - DNA, 80 bp, synthetic construct; identical to SEQ ID NO: 38972
  source 1..80: mol_type = other DNA

SEQ ID NO: 72932 - DNA, 80 bp, synthetic construct; identical to SEQ ID NO: 38973
  source 1..80: mol_type = other DNA

SEQ ID NO: 72933 - DNA, 80 bp, synthetic construct; identical to SEQ ID NO: 13622
  source 1..80: mol_type = other DNA

SEQ ID NO: 72934 - DNA, 80 bp, synthetic construct; identical to SEQ ID NO: 38975
  source 1..80: mol_type = other DNA

SEQ ID NO: 72935 - DNA, 80 bp, synthetic construct; identical to SEQ ID NO: 38976
  source 1..80: mol_type = other DNA

SEQ ID NO: 72936 - DNA, 80 bp, synthetic construct; identical to SEQ ID NO: 38977
  source 1..80: mol_type = other DNA

SEQ ID NO: 72937 - DNA, 80 bp, synthetic construct; identical to SEQ ID NO: 38978
  source 1..80: mol_type = other DNA

SEQ ID NO: 72938 - DNA, 80 bp, synthetic construct; identical to SEQ ID NO: 13623
  source 1..80: mol_type = other DNA

SEQ ID NO: 72939 - DNA, 80 bp, synthetic construct; identical to SEQ ID NO: 38980
  source 1..80: mol_type = other DNA

SEQ ID NO: 72940 - DNA, 80 bp, synthetic construct; identical to SEQ ID NO: 38981
  source 1..80: mol_type = other DNA

SEQ ID NO: 72941 - DNA, 80 bp, synthetic construct; identical to SEQ ID NO: 38982
  source 1..80: mol_type = other DNA

SEQ ID NO: 72942 - DNA, 80 bp, synthetic construct; identical to SEQ ID NO: 13624
  source 1..80: mol_type = other DNA

SEQ ID NO: 72943 - DNA, 80 bp, synthetic construct; identical to SEQ ID NO: 38984
  source 1..80: mol_type = other DNA

SEQ ID NO: 72944 - DNA, 80 bp, synthetic construct; identical to SEQ ID NO: 38985
  source 1..80: mol_type = other DNA

SEQ ID NO: 72945 - DNA, 80 bp, synthetic construct; identical to SEQ ID NO: 13625
  source 1..80: mol_type = other DNA

SEQ ID NO: 72946 - DNA, 80 bp, synthetic construct; identical to SEQ ID NO: 38987
  source 1..80: mol_type = other DNA

SEQ ID NO: 72947 - DNA, 80 bp, synthetic construct; identical to SEQ ID NO: 38988
  source 1..80: mol_type = other DNA

SEQ ID NO: 72948 - DNA, 80 bp, synthetic construct; identical to SEQ ID NO: 38989
  source 1..80: mol_type = other DNA

SEQ ID NO: 72949 - DNA, 80 bp, synthetic construct; identical to SEQ ID NO: 13626
  source 1..80: mol_type = other DNA

SEQ ID NO: 72950 - DNA, 80 bp, synthetic construct; identical to SEQ ID NO: 38991
  source 1..80: mol_type = other DNA

SEQ ID NO: 72951 - DNA, 80 bp, synthetic construct; identical to SEQ ID NO: 38992
  source 1..80: mol_type = other DNA

SEQ ID NO: 72952 - DNA, 80 bp, synthetic construct; identical to SEQ ID NO: 38993
  source 1..80: mol_type = other DNA

SEQ ID NO: 72953 - DNA, 80 bp, synthetic construct; identical to SEQ ID NO: 38994
  source 1..80: mol_type = other DNA

SEQ ID NO: 72954 - DNA, 80 bp, synthetic construct; identical to SEQ ID NO: 13627
  source 1..80: mol_type = other DNA

SEQ ID NO: 72955 - DNA, 80 bp, synthetic construct; identical to SEQ ID NO: 38996
  source 1..80: mol_type = other DNA

SEQ ID NO: 72956 - DNA, 80 bp, synthetic construct; identical to SEQ ID NO: 38997
  source 1..80: mol_type = other DNA

SEQ ID NO: 72957 - DNA, 80 bp, synthetic construct; identical to SEQ ID NO: 13628
  source 1..80: mol_type = other DNA

SEQ ID NO: 72958 - DNA, 80 bp, synthetic construct; identical to SEQ ID NO: 38999
  source 1..80: mol_type = other DNA

SEQ ID NO: 72959 - DNA, 80 bp, synthetic construct; identical to SEQ ID NO: 39000
  source 1..80: mol_type = other DNA

SEQ ID NO: 72960 - DNA, 80 bp, synthetic construct; identical to SEQ ID NO: 39001
  source 1..80: mol_type = other DNA

SEQ ID NO: 72961 - DNA, 80 bp, synthetic construct; identical to SEQ ID NO: 39002
  source 1..80: mol_type = other DNA

SEQ ID NO: 72962 - DNA, 80 bp, synthetic construct; identical to SEQ ID NO: 13629
  source 1..80: mol_type = other DNA

SEQ ID NO: 72963 - DNA, 80 bp, synthetic construct; identical to SEQ ID NO: 39004
  source 1..80: mol_type = other DNA

SEQ ID NO: 72964 - DNA, 80 bp, synthetic construct; identical to SEQ ID NO: 39005
  source 1..80: mol_type = other DNA

SEQ ID NO: 72965 - DNA, 80 bp, synthetic construct; identical to SEQ ID NO: 39006
  source 1..80: mol_type = other DNA

SEQ ID NO: 72966 - DNA, 80 bp, synthetic construct; identical to SEQ ID NO: 39007
  source 1..80: mol_type = other DNA

SEQ ID NO: 72967 - DNA, 80 bp, synthetic construct; identical to SEQ ID NO: 13630
  source 1..80: mol_type = other DNA

SEQ ID NO: 72968 - DNA, 80 bp, synthetic construct; identical to SEQ ID NO: 39009
  source 1..80: mol_type = other DNA

SEQ ID NO: 72969 - DNA, 80 bp, synthetic construct; identical to SEQ ID NO: 39010
  source 1..80: mol_type = other DNA

SEQ ID NO: 72970 - DNA, 80 bp, synthetic construct; identical to SEQ ID NO: 13631
  source 1..80: mol_type = other DNA

SEQ ID NO: 72971 - DNA, 80 bp, synthetic construct; identical to SEQ ID NO: 39013
  source 1..80: mol_type = other DNA

SEQ ID NO: 72972 - DNA, 80 bp, synthetic construct; identical to SEQ ID NO: 39014
  source 1..80: mol_type = other DNA

SEQ ID NO: 72973 - DNA, 80 bp, synthetic construct; identical to SEQ ID NO: 13632
  source 1..80: mol_type = other DNA

SEQ ID NO: 72974 - DNA, 80 bp, synthetic construct; identical to SEQ ID NO: 39016
  source 1..80: mol_type = other DNA

SEQ ID NO: 72975 - DNA, 80 bp, synthetic construct; identical to SEQ ID NO: 39017
  source 1..80: mol_type = other DNA

SEQ ID NO: 72976 - DNA, 80 bp, synthetic construct; identical to SEQ ID NO: 39018
  source 1..80: mol_type = other DNA

SEQ ID NO: 72977 - DNA, 80 bp, synthetic construct; identical to SEQ ID NO: 39019
  source 1..80: mol_type = other DNA

SEQ ID NO: 72978 - DNA, 80 bp, synthetic construct; identical to SEQ ID NO: 13633
  source 1..80: mol_type = other DNA

SEQ ID NO: 72979 - DNA, 80 bp, synthetic construct; identical to SEQ ID NO: 39021
  source 1..80: mol_type = other DNA

SEQ ID NO: 72980 - DNA, 80 bp, synthetic construct; identical to SEQ ID NO: 39022
  source 1..80: mol_type = other DNA

SEQ ID NO: 72981 - DNA, 80 bp, synthetic construct; identical to SEQ ID NO: 13634
  source 1..80: mol_type = other DNA

SEQ ID NO: 72982 - DNA, 80 bp, synthetic construct; identical to SEQ ID NO: 39024
  source 1..80: mol_type = other DNA

SEQ ID NO: 72983 - DNA, 80 bp, synthetic construct; identical to SEQ ID NO: 39025
  source 1..80: mol_type = other DNA

SEQ ID NO: 72984 - DNA, 80 bp, synthetic construct; identical to SEQ ID NO: 39026
  source 1..80: mol_type = other DNA

SEQ ID NO: 72985 - DNA, 80 bp, synthetic construct; identical to SEQ ID NO: 39027
  source 1..80: mol_type = other DNA

SEQ ID NO: 72986 - DNA, 80 bp, synthetic construct; identical to SEQ ID NO: 13635
  source 1..80: mol_type = other DNA

SEQ ID NO: 72987 - DNA, 80 bp, synthetic construct; identical to SEQ ID NO: 39029
  source 1..80: mol_type = other DNA

SEQ ID NO: 72988 - DNA, 80 bp, synthetic construct; identical to SEQ ID NO: 39030
  source 1..80: mol_type = other DNA

SEQ ID NO: 72989 - DNA, 80 bp, synthetic construct; identical to SEQ ID NO: 13636
  source 1..80: mol_type = other DNA

SEQ ID NO: 72990 - DNA, 80 bp, synthetic construct; identical to SEQ ID NO: 39033
  source 1..80: mol_type = other DNA

SEQ ID NO: 72991 - DNA, 80 bp, synthetic construct; identical to SEQ ID NO: 39034
  source 1..80: mol_type = other DNA

SEQ ID NO: 72992 - DNA, 80 bp, synthetic construct; identical to SEQ ID NO: 13637
  source 1..80: mol_type = other DNA

SEQ ID NO: 72993 - DNA, 80 bp, synthetic construct; identical to SEQ ID NO: 39036
  source 1..80: mol_type = other DNA

SEQ ID NO: 72994 - DNA, 80 bp, synthetic construct; identical to SEQ ID NO: 39037
  source 1..80: mol_type = other DNA

SEQ ID NO: 72995 - DNA, 80 bp, synthetic construct; identical to SEQ ID NO: 39038
  source 1..80: mol_type = other DNA

SEQ ID NO: 72996 - DNA, 80 bp, synthetic construct; identical to SEQ ID NO: 13638
  source 1..80: mol_type = other DNA

SEQ ID NO: 72997 - DNA, 80 bp, synthetic construct; identical to SEQ ID NO: 39040
  source 1..80: mol_type = other DNA

SEQ ID NO: 72998 - DNA, 80 bp, synthetic construct; identical to SEQ ID NO: 39041
  source 1..80: mol_type = other DNA

SEQ ID NO: 72999 - DNA, 80 bp, synthetic construct; identical to SEQ ID NO: 39042
  source 1..80: mol_type = other DNA

SEQ ID NO: 73000 - DNA, 80 bp, synthetic construct; identical to SEQ ID NO: 39043
  source 1..80: mol_type = other DNA

SEQ ID NO: 73001 - DNA, 80 bp, synthetic construct; identical to SEQ ID NO: 13639
  source 1..80: mol_type = other DNA

SEQ ID NO: 73002 - DNA, 80 bp, synthetic construct; identical to SEQ ID NO: 39045
  source 1..80: mol_type = other DNA

SEQ ID NO: 73003 - DNA, 80 bp, synthetic construct; identical to SEQ ID NO: 39046
  source 1..80: mol_type = other DNA

SEQ ID NO: 73004 - DNA, 80 bp, synthetic construct; identical to SEQ ID NO: 13640
  source 1..80: mol_type = other DNA

SEQ ID NO: 73005 - DNA, 80 bp, synthetic construct; identical to SEQ ID NO: 39048
  source 1..80: mol_type = other DNA

SEQ ID NO: 73006 - DNA, 80 bp, synthetic construct; identical to SEQ ID NO: 39049
  source 1..80: mol_type = other DNA

SEQ ID NO: 73007 - DNA, 80 bp, synthetic construct; identical to SEQ ID NO: 39050
  source 1..80: mol_type = other DNA

SEQ ID NO: 73008 - DNA, 80 bp, synthetic construct; identical to SEQ ID NO: 39051
  source 1..80: mol_type = other DNA

SEQ ID NO: 73009 - DNA, 80 bp, synthetic construct; identical to SEQ ID NO: 13641
  source 1..80: mol_type = other DNA

SEQ ID NO: 73010 - DNA, 80 bp, synthetic construct; identical to SEQ ID NO: 39053
  source 1..80: mol_type = other DNA

SEQ ID NO: 73011 - DNA, 80 bp, synthetic construct; identical to SEQ ID NO: 39054
  source 1..80: mol_type = other DNA

SEQ ID NO: 73012 - DNA, 80 bp, synthetic construct; identical to SEQ ID NO: 39055
  source 1..80: mol_type = other DNA

SEQ ID NO: 73013 - DNA, 80 bp, synthetic construct; identical to SEQ ID NO: 13642
  source 1..80: mol_type = other DNA

SEQ ID NO: 73014 - DNA, 80 bp, synthetic construct; identical to SEQ ID NO: 39057
  source 1..80: mol_type = other DNA

SEQ ID NO: 73015 - DNA, 80 bp, synthetic construct; identical to SEQ ID NO: 39058
  source 1..80: mol_type = other DNA

SEQ ID NO: 73016 - DNA, 80 bp, synthetic construct; identical to SEQ ID NO: 39059
  source 1..80: mol_type = other DNA

SEQ ID NO: 73017 - DNA, 80 bp, synthetic construct; identical to SEQ ID NO: 39060
  source 1..80: mol_type = other DNA

SEQ ID NO: 73018 - DNA, 80 bp, synthetic construct; identical to SEQ ID NO: 13643
  source 1..80: mol_type = other DNA

SEQ ID NO: 73019 - DNA, 80 bp, synthetic construct; identical to SEQ ID NO: 39062
  source 1..80: mol_type = other DNA

SEQ ID NO: 73020 - DNA, 80 bp, synthetic construct; identical to SEQ ID NO: 39063
  source 1..80: mol_type = other DNA

SEQ ID NO: 73021 - DNA, 80 bp, synthetic construct; identical to SEQ ID NO: 13644
  source 1..80: mol_type = other DNA

SEQ ID NO: 73022 - DNA, 80 bp, synthetic construct; identical to SEQ ID NO: 39065
  source 1..80: mol_type = other DNA

SEQ ID NO: 73023 - DNA, 80 bp, synthetic construct; identical to SEQ ID NO: 39066
  source 1..80: mol_type = other DNA

SEQ ID NO: 73024 - DNA, 80 bp, synthetic construct; identical to SEQ ID NO: 39067
  source 1..80: mol_type = other DNA

SEQ ID NO: 73025 - DNA, 80 bp, synthetic construct; identical to SEQ ID NO: 39068
  source 1..80: mol_type = other DNA

SEQ ID NO: 73026 - DNA, 80 bp, synthetic construct; identical to SEQ ID NO: 13645
  source 1..80: mol_type = other DNA

SEQ ID NO: 73027 - DNA, 80 bp, synthetic construct; identical to SEQ ID NO: 39070
  source 1..80: mol_type = other DNA

SEQ ID NO: 73028 - DNA, 80 bp, synthetic construct; identical to SEQ ID NO: 39071
  source 1..80: mol_type = other DNA

SEQ ID NO: 73029 - DNA, 80 bp, synthetic construct; identical to SEQ ID NO: 39072
  source 1..80: mol_type = other DNA

SEQ ID NO: 73030 - DNA, 80 bp, synthetic construct; identical to SEQ ID NO: 13646
  source 1..80: mol_type = other DNA

SEQ ID NO: 73031 - DNA, 80 bp, synthetic construct; identical to SEQ ID NO: 39074
  source 1..80: mol_type = other DNA

SEQ ID NO: 73032 - DNA, 80 bp, synthetic construct; identical to SEQ ID NO: 39075
  source 1..80: mol_type = other DNA

SEQ ID NO: 73033 - DNA, 80 bp, synthetic construct; identical to SEQ ID NO: 39076
  source 1..80: mol_type = other DNA

SEQ ID NO: 73034 - DNA, 80 bp, synthetic construct; identical to SEQ ID NO: 13647
  source 1..80: mol_type = other DNA

SEQ ID NO: 73035 - DNA, 80 bp, synthetic construct; identical to SEQ ID NO: 39078
  source 1..80: mol_type = other DNA

SEQ ID NO: 73036 - DNA, 80 bp, synthetic construct; identical to SEQ ID NO: 39079
  source 1..80: mol_type = other DNA

SEQ ID NO: 73037 - DNA, 80 bp, synthetic construct; identical to SEQ ID NO: 39080
  source 1..80: mol_type = other DNA

SEQ ID NO: 73038 - DNA, 80 bp, synthetic construct; identical to SEQ ID NO: 39081
  source 1..80: mol_type = other DNA

SEQ ID NO: 73039 - DNA, 80 bp, synthetic construct; identical to SEQ ID NO: 13648
  source 1..80: mol_type = other DNA

SEQ ID NO: 73040 - DNA, 80 bp, synthetic construct; identical to SEQ ID NO: 39083
  source 1..80: mol_type = other DNA

SEQ ID NO: 73041 - DNA, 80 bp, synthetic construct; identical to SEQ ID NO: 39084
  source 1..80: mol_type = other DNA

SEQ ID NO: 73042 - DNA, 80 bp, synthetic construct; identical to SEQ ID NO: 13649
  source 1..80: mol_type = other DNA

SEQ ID NO: 73043 - DNA, 80 bp, synthetic construct; identical to SEQ ID NO: 39087
  source 1..80: mol_type = other DNA

SEQ ID NO: 73044 - DNA, 80 bp, synthetic construct; identical to SEQ ID NO: 39088
  source 1..80: mol_type = other DNA

SEQ ID NO: 73045 - DNA, 80 bp, synthetic construct; identical to SEQ ID NO: 13650
  source 1..80: mol_type = other DNA

SEQ ID NO: 73046 - DNA, 80 bp, synthetic construct; identical to SEQ ID NO: 39091
  source 1..80: mol_type = other DNA

SEQ ID NO: 73047 - DNA, 80 bp, synthetic construct; identical to SEQ ID NO: 39092
  source 1..80: mol_type = other DNA

SEQ ID NO: 73048 - DNA, 80 bp, synthetic construct; identical to SEQ ID NO: 13651
  source 1..80: mol_type = other DNA

SEQ ID NO: 73049 - DNA, 80 bp, synthetic construct; identical to SEQ ID NO: 39095
  source 1..80: mol_type = other DNA

SEQ ID NO: 73050 - DNA, 80 bp, synthetic construct; identical to SEQ ID NO: 39096
  source 1..80: mol_type = other DNA

SEQ ID NO: 73051 - DNA, 80 bp, synthetic construct; identical to SEQ ID NO: 13652
  source 1..80: mol_type = other DNA

SEQ ID NO: 73052 - DNA, 80 bp, synthetic construct; identical to SEQ ID NO: 39098
  source 1..80: mol_type = other DNA

SEQ ID NO: 73053 - DNA, 80 bp, synthetic construct; identical to SEQ ID NO: 39099
  source 1..80: mol_type = other DNA

SEQ ID NO: 73054 - DNA, 80 bp, synthetic construct; identical to SEQ ID NO: 39100
  source 1..80: mol_type = other DNA

SEQ ID NO: 73055 - DNA, 80 bp, synthetic construct; identical to SEQ ID NO: 39101
  source 1..80: mol_type = other DNA

SEQ ID NO: 73056 - DNA, 80 bp, synthetic construct; identical to SEQ ID NO: 13653
  source 1..80: mol_type = other DNA

SEQ ID NO: 73057 - DNA, 80 bp, synthetic construct; identical to SEQ ID NO: 39103
  source 1..80: mol_type = other DNA

SEQ ID NO: 73058 - DNA, 80 bp, synthetic construct; identical to SEQ ID NO: 39104
  source 1..80: mol_type = other DNA

SEQ ID NO: 73059 - DNA, 80 bp, synthetic construct; identical to SEQ ID NO: 39105
  source 1..80: mol_type = other DNA

SEQ ID NO: 73060 - DNA, 80 bp, synthetic construct; identical to SEQ ID NO: 13654
  source 1..80: mol_type = other DNA

SEQ ID NO: 73061 - DNA, 80 bp, synthetic construct; identical to SEQ ID NO: 39107
  source 1..80: mol_type = other DNA

SEQ ID NO: 73062 - DNA, 80 bp, synthetic construct; identical to SEQ ID NO: 39108
  source 1..80: mol_type = other DNA

SEQ ID NO: 73063 - DNA, 80 bp, synthetic construct; identical to SEQ ID NO: 39109
  source 1..80: mol_type = other DNA

SEQ ID NO: 73064 - DNA, 80 bp, synthetic construct; identical to SEQ ID NO: 39110
  source 1..80: mol_type = other DNA

SEQ ID NO: 73065 - DNA, 80 bp, synthetic construct; identical to SEQ ID NO: 13655
  source 1..80: mol_type = other DNA

SEQ ID NO: 73066 - DNA, 80 bp, synthetic construct; identical to SEQ ID NO: 39112
  source 1..80: mol_type = other DNA

SEQ ID NO: 73067 - DNA, 80 bp, synthetic construct; identical to SEQ ID NO: 39113
  source 1..80: mol_type = other DNA

SEQ ID NO: 73068 - DNA, 80 bp, synthetic construct; identical to SEQ ID NO: 39114
  source 1..80: mol_type = other DNA

SEQ ID NO: 73069 - DNA, 80 bp, synthetic construct; identical to SEQ ID NO: 13656
  source 1..80: mol_type = other DNA

SEQ ID NO: 73070 - DNA, 80 bp, synthetic construct; identical to SEQ ID NO: 39116
  source 1..80: mol_type = other DNA

SEQ ID NO: 73071 - DNA, 80 bp, synthetic construct; identical to SEQ ID NO: 39117
  source 1..80: mol_type = other DNA

SEQ ID NO: 73072 - DNA, 80 bp, synthetic construct; identical to SEQ ID NO: 39118
  source 1..80: mol_type = other DNA

SEQ ID NO: 73073 - DNA, 80 bp, synthetic construct; identical to SEQ ID NO: 13657
  source 1..80: mol_type = other DNA

SEQ ID NO: 73074 - DNA, 80 bp, synthetic construct; identical to SEQ ID NO: 39120
  source 1..80: mol_type = other DNA

SEQ ID NO: 73075 - DNA, 80 bp, synthetic construct; identical to SEQ ID NO: 13658
  source 1..80: mol_type = other DNA

SEQ ID NO: 73076 - DNA, 80 bp, synthetic construct; identical to SEQ ID NO: 39123
  source 1..80: mol_type = other DNA

SEQ ID NO: 73077 - DNA, 80 bp, synthetic construct; identical to SEQ ID NO: 39124
  source 1..80: mol_type = other DNA

SEQ ID NO: 73078 - DNA, 80 bp, synthetic construct; identical to SEQ ID NO: 39125
  source 1..80: mol_type = other DNA

SEQ ID NO: 73079 - DNA, 80 bp, synthetic construct; identical to SEQ ID NO: 13659
  source 1..80: mol_type = other DNA

SEQ ID NO: 73080 - DNA, 80 bp, synthetic construct; identical to SEQ ID NO: 39128
  source 1..80: mol_type = other DNA

SEQ ID NO: 73081 - DNA, 80 bp, synthetic construct; identical to SEQ ID NO: 39129
  source 1..80: mol_type = other DNA

SEQ ID NO: 73082 - DNA, 80 bp, synthetic construct; identical to SEQ ID NO: 13660
  source 1..80: mol_type = other DNA

SEQ ID NO: 73083 - DNA, 80 bp, synthetic construct; identical to SEQ ID NO: 39131
  source 1..80: mol_type = other DNA

SEQ ID NO: 73084 - DNA, 80 bp, synthetic construct; identical to SEQ ID NO: 39132
  source 1..80: mol_type = other DNA

SEQ ID NO: 73085 - DNA, 80 bp, synthetic construct; identical to SEQ ID NO: 39133
  source 1..80: mol_type = other DNA

SEQ ID NO: 73086 - DNA, 80 bp, synthetic construct; identical to SEQ ID NO: 13661
  source 1..80: mol_type = other DNA

SEQ ID NO: 73087 - DNA, 80 bp, synthetic construct; identical to SEQ ID NO: 39135
  source 1..80: mol_type = other DNA

SEQ ID NO: 73088 - DNA, 80 bp, synthetic construct; identical to SEQ ID NO: 39136
  source 1..80: mol_type = other DNA

SEQ ID NO: 73089 - DNA, 80 bp, synthetic construct; identical to SEQ ID NO: 39137
  source 1..80: mol_type = other DNA

SEQ ID NO: 73090 - DNA, 80 bp, synthetic construct; identical to SEQ ID NO: 13662
  source 1..80: mol_type = other DNA

SEQ ID NO: 73091 - DNA, 80 bp, synthetic construct; identical to SEQ ID NO: 39139
  source 1..80: mol_type = other DNA

SEQ ID NO: 73092 - DNA, 80 bp, synthetic construct; identical to SEQ ID NO: 39140
  source 1..80: mol_type = other DNA

SEQ ID NO: 73093 - DNA, 80 bp, synthetic construct; identical to SEQ ID NO: 39141
  source 1..80: mol_type = other DNA

SEQ ID NO: 73094 - DNA, 80 bp, synthetic construct; identical to SEQ ID NO: 13663
  source 1..80: mol_type = other DNA

SEQ ID NO: 73095 - DNA, 80 bp, synthetic construct; identical to SEQ ID NO: 39143
  source 1..80: mol_type = other DNA

SEQ ID NO: 73096 - DNA, 80 bp, synthetic construct; identical to SEQ ID NO: 39144
  source 1..80: mol_type = other DNA

SEQ ID NO: 73097 - DNA, 80 bp, synthetic construct; identical to SEQ ID NO: 39145
  source 1..80: mol_type = other DNA

SEQ ID NO: 73098 - DNA, 80 bp, synthetic construct; identical to SEQ ID NO: 13664
  source 1..80: mol_type = other DNA

SEQ ID NO: 73099 - DNA, 80 bp, synthetic construct; identical to SEQ ID NO: 39148
  source 1..80: mol_type = other DNA

SEQ ID NO: 73100 - DNA, 80 bp, synthetic construct; identical to SEQ ID NO: 39149
  source 1..80: mol_type = other DNA

SEQ ID NO: 73101 - DNA, 80 bp, synthetic construct; identical to SEQ ID NO: 13665
  source 1..80: mol_type = other DNA

SEQ ID NO: 73102 - DNA, 80 bp, synthetic construct; identical to SEQ ID NO: 39151
  source 1..80: mol_type = other DNA

SEQ ID NO: 73103 - DNA, 80 bp, synthetic construct; identical to SEQ ID NO: 39152
  source 1..80: mol_type = other DNA

SEQ ID NO: 73104 - DNA, 80 bp, synthetic construct; identical to SEQ ID NO: 39153
  source 1..80: mol_type = other DNA

SEQ ID NO: 73105 - DNA, 80 bp, synthetic construct; identical to SEQ ID NO: 13666
  source 1..80: mol_type = other DNA

SEQ ID NO: 73106 - DNA, 80 bp, synthetic construct; identical to SEQ ID NO: 39155
  source 1..80: mol_type = other DNA

SEQ ID NO: 73107 - DNA, 80 bp, synthetic construct; identical to SEQ ID NO: 39156
  source 1..80: mol_type = other DNA

SEQ ID NO: 73108 - DNA, 80 bp, synthetic construct; identical to SEQ ID NO: 39157
  source 1..80: mol_type = other DNA

SEQ ID NO: 73109 - DNA, 80 bp, synthetic construct; identical to SEQ ID NO: 13667
  source 1..80: mol_type = other DNA

SEQ ID NO: 73110 - DNA, 80 bp, synthetic construct; identical to SEQ ID NO: 39159
  source 1..80: mol_type = other DNA

SEQ ID NO: 73111 - DNA, 80 bp, synthetic construct; identical to SEQ ID NO: 39160
  source 1..80: mol_type = other DNA

SEQ ID NO: 73112 - DNA, 80 bp, synthetic construct; identical to SEQ ID NO: 39161
  source 1..80: mol_type = other DNA

SEQ ID NO: 73113 - DNA, 80 bp, synthetic construct; identical to SEQ ID NO: 13668
  source 1..80: mol_type = other DNA

SEQ ID NO: 73114 - DNA, 80 bp, synthetic construct; identical to SEQ ID NO: 39163
  source 1..80: mol_type = other DNA

SEQ ID NO: 73115 - DNA, 80 bp, synthetic construct; identical to SEQ ID NO: 39164
  source 1..80: mol_type = other DNA

SEQ ID NO: 73116 - DNA, 80 bp, synthetic construct; identical to SEQ ID NO: 39165
  source 1..80: mol_type = other DNA

SEQ ID NO: 73117 - DNA, 80 bp, synthetic construct; identical to SEQ ID NO: 39166
  source 1..80: mol_type = other DNA

SEQ ID NO: 73118 - DNA, 80 bp, synthetic construct; identical to SEQ ID NO: 13669
  source 1..80: mol_type = other DNA

SEQ ID NO: 73119 - DNA, 80 bp, synthetic construct; identical to SEQ ID NO: 39168
  source 1..80: mol_type = other DNA

SEQ ID NO: 73120 - DNA, 80 bp, synthetic construct; identical to SEQ ID NO: 39169
  source 1..80: mol_type = other DNA

SEQ ID NO: 73121 - DNA, 80 bp, synthetic construct; identical to SEQ ID NO: 13670
  source 1..80: mol_type = other DNA

SEQ ID NO: 73122 - DNA, 80 bp, synthetic construct; identical to SEQ ID NO: 39171
  source 1..80: mol_type = other DNA

SEQ ID NO: 73123 - DNA, 80 bp, synthetic construct; identical to SEQ ID NO: 39172
  source 1..80: mol_type = other DNA

SEQ ID NO: 73124 - DNA, 80 bp, synthetic construct; identical to SEQ ID NO: 39173
  source 1..80: mol_type = other DNA

SEQ ID NO: 73125 - DNA, 80 bp, synthetic construct; identical to SEQ ID NO: 39174
  source 1..80: mol_type = other DNA

SEQ ID NO: 73126 - DNA, 80 bp, synthetic construct; identical to SEQ ID NO: 13671
  source 1..80: mol_type = other DNA

SEQ ID NO: 73127 - DNA, 80 bp, synthetic construct; identical to SEQ ID NO: 39176
  source 1..80: mol_type = other DNA

SEQ ID NO: 73128 - DNA, 80 bp, synthetic construct; identical to SEQ ID NO: 39177
  source 1..80: mol_type = other DNA

SEQ ID NO: 73129 - DNA, 80 bp, synthetic construct; identical to SEQ ID NO: 39178
  source 1..80: mol_type = other DNA

SEQ ID NO: 73130 - DNA, 80 bp, synthetic construct; identical to SEQ ID NO: 13672
  source 1..80: mol_type = other DNA

SEQ ID NO: 73131 - DNA, 80 bp, synthetic construct; identical to SEQ ID NO: 39180
  source 1..80: mol_type = other DNA

SEQ ID NO: 73132 - DNA, 80 bp, synthetic construct; identical to SEQ ID NO: 39181
  source 1..80: mol_type = other DNA

SEQ ID NO: 73133 - DNA, 80 bp, synthetic construct; identical to SEQ ID NO: 39182
  source 1..80: mol_type = other DNA

SEQ ID NO: 73134 - DNA, 80 bp, synthetic construct; identical to SEQ ID NO: 13673
  source 1..80: mol_type = other DNA

SEQ ID NO: 73135 - DNA, 80 bp, synthetic construct; identical to SEQ ID NO: 39185
  source 1..80: mol_type = other DNA

SEQ ID NO: 73136 - DNA, 80 bp, synthetic construct; identical to SEQ ID NO: 39186
  source 1..80: mol_type = other DNA

SEQ ID NO: 73137 - DNA, 80 bp, synthetic construct; identical to SEQ ID NO: 39187
  source 1..80: mol_type = other DNA

SEQ ID NO: 73138 - DNA, 80 bp, synthetic construct; identical to SEQ ID NO: 13674
  source 1..80: mol_type = other DNA

SEQ ID NO: 73139 - DNA, 80 bp, synthetic construct; identical to SEQ ID NO: 39189
  source 1..80: mol_type = other DNA

SEQ ID NO: 73140 - DNA, 80 bp, synthetic construct; identical to SEQ ID NO: 39190
  source 1..80: mol_type = other DNA

SEQ ID NO: 73141 - DNA, 80 bp, synthetic construct; identical to SEQ ID NO: 39191
  source 1..80: mol_type = other DNA

SEQ ID NO: 73142 - DNA, 80 bp, synthetic construct; identical to SEQ ID NO: 39192
  source 1..80: mol_type = other DNA

SEQ ID NO: 73143 - DNA, 80 bp, synthetic construct; identical to SEQ ID NO: 13675
  source 1..80: mol_type = other DNA

SEQ ID NO: 73144 - DNA, 80 bp, synthetic construct; identical to SEQ ID NO: 39194
  source 1..80: mol_type = other DNA

SEQ ID NO: 73145 - DNA, 80 bp, synthetic construct; identical to SEQ ID NO: 39195
  source 1..80: mol_type = other DNA

SEQ ID NO: 73146 - DNA, 80 bp, synthetic construct; identical to SEQ ID NO: 13676
  source 1..80: mol_type = other DNA

SEQ ID NO: 73147 - DNA, 80 bp, synthetic construct; identical to SEQ ID NO: 39197
  source 1..80: mol_type = other DNA

SEQ ID NO: 73148 - DNA, 80 bp, synthetic construct; identical to SEQ ID NO: 39198
  source 1..80: mol_type = other DNA

SEQ ID NO: 73149 - DNA, 80 bp, synthetic construct; identical to SEQ ID NO: 39199
  source 1..80: mol_type = other DNA

SEQ ID NO: 73150 - DNA, 80 bp, synthetic construct; identical to SEQ ID NO: 39200
  source 1..80: mol_type = other DNA

SEQ ID NO: 73151 - DNA, 80 bp, synthetic construct; identical to SEQ ID NO: 13677
  source 1..80: mol_type = other DNA

SEQ ID NO: 73152 - DNA, 80 bp, synthetic construct; identical to SEQ ID NO: 39202
  source 1..80: mol_type = other DNA

SEQ ID NO: 73153 - DNA, 80 bp, synthetic construct; identical to SEQ ID NO: 13678
  source 1..80: mol_type = other DNA

SEQ ID NO: 73154 - DNA, 80 bp, synthetic construct; identical to SEQ ID NO: 39205
  source 1..80: mol_type = other DNA

SEQ ID NO: 73155 - DNA, 80 bp, synthetic construct; identical to SEQ ID NO: 39206
  source 1..80: mol_type = other DNA

SEQ ID NO: 73156 - DNA, 80 bp, synthetic construct; identical to SEQ ID NO: 39207
  source 1..80: mol_type = other DNA

SEQ ID NO: 73157 - DNA, 80 bp, synthetic construct; identical to SEQ ID NO: 13679
  source 1..80: mol_type = other DNA

SEQ ID NO: 73158 - DNA, 80 bp, synthetic construct; identical to SEQ ID NO: 39209
  source 1..80: mol_type = other DNA

SEQ ID NO: 73159 - DNA, 80 bp, synthetic construct; identical to SEQ ID NO: 39210
  source 1..80: mol_type = other DNA

SEQ ID NO: 73160 - DNA, 80 bp, synthetic construct; identical to SEQ ID NO: 39211
  source 1..80: mol_type = other DNA

SEQ ID NO: 73161 - DNA, 80 bp, synthetic construct; identical to SEQ ID NO: 39212
  source 1..80: mol_type = other DNA

SEQ ID NO: 73162 - DNA, 80 bp, synthetic construct; identical to SEQ ID NO: 13680
  source 1..80: mol_type = other DNA

SEQ ID NO: 73163 - DNA, 80 bp, synthetic construct; identical to SEQ ID NO: 39214
  source 1..80: mol_type = other DNA

SEQ ID NO: 73164 - DNA, 80 bp, synthetic construct; identical to SEQ ID NO: 39215
  source 1..80: mol_type = other DNA

SEQ ID NO: 73165 - DNA, 80 bp, synthetic construct; identical to SEQ ID NO: 13681
  source 1..80: mol_type = other DNA

SEQ ID NO: 73166 - DNA, 80 bp, synthetic construct; identical to SEQ ID NO: 39219
  source 1..80: mol_type = other DNA

SEQ ID NO: 73167 - DNA, 80 bp, synthetic construct; identical to SEQ ID NO: 39220
  source 1..80: mol_type = other DNA

SEQ ID NO: 73168 - DNA, 80 bp, synthetic construct; identical to SEQ ID NO: 13682
  source 1..80: mol_type = other DNA

SEQ ID NO: 73169 - DNA, 80 bp, synthetic construct; identical to SEQ ID NO: 39222
  source 1..80: mol_type = other DNA

SEQ ID NO: 73170 - DNA, 80 bp, synthetic construct; identical to SEQ ID NO: 39223
  source 1..80: mol_type = other DNA

SEQ ID NO: 73171 - DNA, 80 bp, synthetic construct; identical to SEQ ID NO: 13683
  source 1..80: mol_type = other DNA

SEQ ID NO: 73172 - DNA, 80 bp, synthetic construct; identical to SEQ ID NO: 39226
  source 1..80: mol_type = other DNA

SEQ ID NO: 73173 - DNA, 80 bp, synthetic construct; identical to SEQ ID NO: 39227
  source 1..80: mol_type = other DNA

SEQ ID NO: 73174 - DNA, 80 bp, synthetic construct; identical to SEQ ID NO: 13684
  source 1..80: mol_type = other DNA

SEQ ID NO: 73175 - DNA, 80 bp, synthetic construct; identical to SEQ ID NO: 39229
  source 1..80: mol_type = other DNA

SEQ ID NO: 73176 - DNA, 80 bp, synthetic construct; identical to SEQ ID NO: 39230
  source 1..80: mol_type = other DNA

SEQ ID NO: 73177 - DNA, 80 bp, synthetic construct; identical to SEQ ID NO: 39231
  source 1..80: mol_type = other DNA

SEQ ID NO: 73178 - DNA, 80 bp, synthetic construct; identical to SEQ ID NO: 13685
  source 1..80: mol_type = other DNA

SEQ ID NO: 73179 - DNA, 80 bp, synthetic construct; identical to SEQ ID NO: 39233
  source 1..80: mol_type = other DNA

SEQ ID NO: 73180 - DNA, 80 bp, synthetic construct; identical to SEQ ID NO: 39234
  source 1..80: mol_type = other DNA

SEQ ID NO: 73181 - DNA, 80 bp, synthetic construct; identical to SEQ ID NO: 39235
  source 1..80: mol_type = other DNA

SEQ ID NO: 73182 - DNA, 80 bp, synthetic construct; identical to SEQ ID NO: 39236
  source 1..80: mol_type = other DNA

SEQ ID NO: 73183 - DNA, 80 bp, synthetic construct; identical to SEQ ID NO: 13686
  source 1..80: mol_type = other DNA

SEQ ID NO: 73184 - DNA, 80 bp, synthetic construct; identical to SEQ ID NO: 39238
  source 1..80: mol_type = other DNA

SEQ ID NO: 73185 - DNA, 80 bp, synthetic construct; identical to SEQ ID NO: 39240
  source 1..80: mol_type = other DNA

SEQ ID NO: 73186 - DNA, 80 bp, synthetic construct; identical to SEQ ID NO: 13687
  source 1..80: mol_type = other DNA

SEQ ID NO: 73187 - DNA, 80 bp, synthetic construct; identical to SEQ ID NO: 39242
  source 1..80: mol_type = other DNA

SEQ ID NO: 73188 - DNA, 80 bp, synthetic construct; identical to SEQ ID NO: 39243
  source 1..80: mol_type = other DNA

SEQ ID NO: 73189 - DNA, 80 bp, synthetic construct; identical to SEQ ID NO: 39244
  source 1..80: mol_type = other DNA

SEQ ID NO: 73190 - DNA, 80 bp, synthetic construct; identical to SEQ ID NO: 13688
  source 1..80: mol_type = other DNA

SEQ ID NO: 73191 - DNA, 80 bp, synthetic construct; identical to SEQ ID NO: 39246
  source 1..80: mol_type = other DNA

SEQ ID NO: 73192 - DNA, 80 bp, synthetic construct; identical to SEQ ID NO: 39247
  source 1..80: mol_type = other DNA

SEQ ID NO: 73193 - DNA, 80 bp, synthetic construct; identical to SEQ ID NO: 13689
  source 1..80: mol_type = other DNA

SEQ ID NO: 73194 - DNA, 80 bp, synthetic construct; identical to SEQ ID NO: 39249
  source 1..80: mol_type = other DNA

SEQ ID NO: 73195 - DNA, 80 bp, synthetic construct; identical to SEQ ID NO: 39250
  source 1..80: mol_type = other DNA

SEQ ID NO: 73196 - DNA, 80 bp, synthetic construct; identical to SEQ ID NO: 39251
  source 1..80: mol_type = other DNA

SEQ ID NO: 73197 - DNA, 80 bp, synthetic construct; identical to SEQ ID NO: 13690
  source 1..80: mol_type = other DNA

SEQ ID NO: 73198 - DNA, 80 bp, synthetic construct; identical to SEQ ID NO: 39253
  source 1..80: mol_type = other DNA

SEQ ID NO: 73199 - DNA, 80 bp, synthetic construct; identical to SEQ ID NO: 39254
  source 1..80: mol_type = other DNA

SEQ ID NO: 73200 - DNA, 80 bp, synthetic construct; identical to SEQ ID NO: 39255
  source 1..80: mol_type = other DNA

SEQ ID NO: 73201 - DNA, 80 bp, synthetic construct; identical to SEQ ID NO: 39256
  source 1..80: mol_type = other DNA

SEQ ID NO: 73202 - DNA, 80 bp, synthetic construct; identical to SEQ ID NO: 13691
  source 1..80: mol_type = other DNA

SEQ ID NO: 73203 - DNA, 80 bp, synthetic construct; identical to SEQ ID NO: 39258
  source 1..80: mol_type = other DNA

SEQ ID NO: 73204 - DNA, 80 bp, synthetic construct; identical to SEQ ID NO: 39259
  source 1..80: mol_type = other DNA

SEQ ID NO: 73205 - DNA, 80 bp, synthetic construct; identical to SEQ ID NO: 13692
  source 1..80: mol_type = other DNA

SEQ ID NO: 73206 - DNA, 80 bp, synthetic construct; identical to SEQ ID NO: 39261
  source 1..80: mol_type = other DNA

SEQ ID NO: 73207 - DNA, 80 bp, synthetic construct; identical to SEQ ID NO: 39262
  source 1..80: mol_type = other DNA

SEQ ID NO: 73208 - DNA, 80 bp, synthetic construct; identical to SEQ ID NO: 39263
  source 1..80: mol_type = other DNA

SEQ ID NO: 73209 - DNA, 80 bp, synthetic construct; identical to SEQ ID NO: 13693
  source 1..80: mol_type = other DNA

SEQ ID NO: 73210 - DNA, 80 bp, synthetic construct; identical to SEQ ID NO: 39265
  source 1..80: mol_type = other DNA

SEQ ID NO: 73211 - DNA, 80 bp, synthetic construct; identical to SEQ ID NO: 39266
  source 1..80: mol_type = other DNA

SEQ ID NO: 73212 - DNA, 80 bp, synthetic construct; identical to SEQ ID NO: 39267
  source 1..80: mol_type = other DNA

SEQ ID NO: 73213 - DNA, 80 bp, synthetic construct; identical to SEQ ID NO: 39268
  source 1..80: mol_type = other DNA

SEQ ID NO: 73214 - DNA, 80 bp, synthetic construct; identical to SEQ ID NO: 13694
  source 1..80: mol_type = other DNA

SEQ ID NO: 73215 - DNA, 80 bp, synthetic construct; identical to SEQ ID NO: 39270
  source 1..80: mol_type = other DNA

SEQ ID NO: 73216 - DNA, 80 bp, synthetic construct; identical to SEQ ID NO: 39271
  source 1..80: mol_type = other DNA

SEQ ID NO: 73217 - DNA, 80 bp, synthetic construct; identical to SEQ ID NO: 13695
  source 1..80: mol_type = other DNA

SEQ ID NO: 73218 - DNA, 80 bp, synthetic construct; identical to SEQ ID NO: 39273
  source 1..80: mol_type = other DNA

SEQ ID NO: 73219 - DNA, 80 bp, synthetic construct; identical to SEQ ID NO: 39274
  source 1..80: mol_type = other DNA

SEQ ID NO: 73220 - DNA, 80 bp, synthetic construct; identical to SEQ ID NO: 39275
  source 1..80: mol_type = other DNA

SEQ ID NO: 73221 - DNA, 80 bp, synthetic construct; identical to SEQ ID NO: 39276
  source 1..80: mol_type = other DNA

SEQ ID NO: 73222 - DNA, 80 bp, synthetic construct; identical to SEQ ID NO: 13696
  source 1..80: mol_type = other DNA

SEQ ID NO: 73223 - DNA, 80 bp, synthetic construct; identical to SEQ ID NO: 39278
  source 1..80: mol_type = other DNA

SEQ ID NO: 73224 - DNA, 80 bp, synthetic construct; identical to SEQ ID NO: 39279
  source 1..80: mol_type = other DNA

SEQ ID NO: 73225 - DNA, 80 bp, synthetic construct; identical to SEQ ID NO: 13697
  source 1..80: mol_type = other DNA

SEQ ID NO: 73226 - DNA, 80 bp, synthetic construct; identical to SEQ ID NO: 39281
  source 1..80: mol_type = other DNA

SEQ ID NO: 73227 - DNA, 80 bp, synthetic construct; identical to SEQ ID NO: 39282
  source 1..80: mol_type = other DNA

SEQ ID NO: 73228 - DNA, 80 bp, synthetic construct; identical to SEQ ID NO: 39283
  source 1..80: mol_type = other DNA

SEQ ID NO: 73229 - DNA, 80 bp, synthetic construct; identical to SEQ ID NO: 13698
  source 1..80: mol_type = other DNA

SEQ ID NO: 73230 - DNA, 80 bp, synthetic construct; identical to SEQ ID NO: 39285
  source 1..80: mol_type = other DNA

SEQ ID NO: 73231 - DNA, 80 bp, synthetic construct; identical to SEQ ID NO: 39287
  source 1..80: mol_type = other DNA

SEQ ID NO: 73232 - DNA, 80 bp, synthetic construct; identical to SEQ ID NO: 13699
  source 1..80: mol_type = other DNA

SEQ ID NO: 73233 - DNA, 80 bp, synthetic construct; identical to SEQ ID NO: 39289
  source 1..80: mol_type = other DNA

SEQ ID NO: 73234 - DNA, 80 bp, synthetic construct; identical to SEQ ID NO: 39290
  source 1..80: mol_type = other DNA

SEQ ID NO: 73235 - DNA, 80 bp, synthetic construct; identical to SEQ ID NO: 39291
  source 1..80: mol_type = other DNA

SEQ ID NO: 73236 - DNA, 80 bp, synthetic construct; identical to SEQ ID NO: 39292
  source 1..80: mol_type = other DNA

SEQ ID NO: 73237 - DNA, 80 bp, synthetic construct; identical to SEQ ID NO: 13700
  source 1..80: mol_type = other DNA

SEQ ID NO: 73238 - DNA, 80 bp, synthetic construct; identical to SEQ ID NO: 39294
  source 1..80: mol_type = other DNA

SEQ ID NO: 73239 - DNA, 80 bp, synthetic construct; identical to SEQ ID NO: 39295
  source 1..80: mol_type = other DNA

SEQ ID NO: 73240 - DNA, 80 bp, synthetic construct; identical to SEQ ID NO: 39296
  source 1..80: mol_type = other DNA

SEQ ID NO: 73241 - DNA, 80 bp, synthetic construct; identical to SEQ ID NO: 13701
  source 1..80: mol_type = other DNA

SEQ ID NO: 73242 - DNA, 80 bp, synthetic construct; identical to SEQ ID NO: 39298
  source 1..80: mol_type = other DNA

SEQ ID NO: 73243 - DNA, 80 bp, synthetic construct; identical to SEQ ID NO: 39299
  source 1..80: mol_type = other DNA

SEQ ID NO: 73244 - DNA, 80 bp, synthetic construct; identical to SEQ ID NO: 39300
  source 1..80: mol_type = other DNA

SEQ ID NO: 73245 - DNA, 80 bp, synthetic construct; identical to SEQ ID NO: 13702
  source 1..80: mol_type = other DNA

SEQ ID NO: 73246 - DNA, 80 bp, synthetic construct; identical to SEQ ID NO: 39302
  source 1..80: mol_type = other DNA

SEQ ID NO: 73247 - DNA, 80 bp, synthetic construct; identical to SEQ ID NO: 39303
  source 1..80: mol_type = other DNA

SEQ ID NO: 73248 - DNA, 80 bp, synthetic construct; identical to SEQ ID NO: 39304
  source 1..80: mol_type = other DNA

SEQ ID NO: 73249 - DNA, 80 bp, synthetic construct; identical to SEQ ID NO: 13703
  source 1..80: mol_type = other DNA

SEQ ID NO: 73250 - DNA, 80 bp, synthetic construct; identical to SEQ ID NO: 39306
  source 1..80: mol_type = other DNA

SEQ ID NO: 73251 - DNA, 80 bp, synthetic construct; identical to SEQ ID NO: 39307
  source 1..80: mol_type = other DNA

SEQ ID NO: 73252 - DNA, 80 bp, synthetic construct; identical to SEQ ID NO: 39308
  source 1..80: mol_type = other DNA

SEQ ID NO: 73253 - DNA, 80 bp, synthetic construct; identical to SEQ ID NO: 39309
  source 1..80: mol_type = other DNA

SEQ ID NO: 73254 - DNA, 80 bp, synthetic construct; identical to SEQ ID NO: 13704
  source 1..80: mol_type = other DNA

SEQ ID NO: 73255 - DNA, 80 bp, synthetic construct; identical to SEQ ID NO: 39311
  source 1..80: mol_type = other DNA

SEQ ID NO: 73256 - DNA, 80 bp, synthetic construct; identical to SEQ ID NO: 39312
  source 1..80: mol_type = other DNA

SEQ ID NO: 73257 - DNA, 80 bp, synthetic construct; identical to SEQ ID NO: 13705
  source 1..80: mol_type = other DNA

SEQ ID NO: 73258 - DNA, 80 bp, synthetic construct; identical to SEQ ID NO: 39315
  source 1..80: mol_type = other DNA

SEQ ID NO: 73259 - DNA, 80 bp, synthetic construct; identical to SEQ ID NO: 39316
  source 1..80: mol_type = other DNA

SEQ ID NO: 73260 - DNA, 80 bp, synthetic construct; identical to SEQ ID NO: 39317
  source 1..80: mol_type = other DNA

SEQ ID NO: 73261 - DNA, 80 bp, synthetic construct; identical to SEQ ID NO: 13706
  source 1..80: mol_type = other DNA

SEQ ID NO: 73262 - DNA, 80 bp, synthetic construct; identical to SEQ ID NO: 39319
  source 1..80: mol_type = other DNA

SEQ ID NO: 73263 - DNA, 80 bp, synthetic construct; identical to SEQ ID NO: 39320
  source 1..80: mol_type = other DNA

SEQ ID NO: 73264 - DNA, 80 bp, synthetic construct; identical to SEQ ID NO: 13707
  source 1..80: mol_type = other DNA

SEQ ID NO: 73265 - DNA, 80 bp, synthetic construct; identical to SEQ ID NO: 39322
  source 1..80: mol_type = other DNA

SEQ ID NO: 73266 - DNA, 80 bp, synthetic construct; identical to SEQ ID NO: 39323
  source 1..80: mol_type = other DNA

SEQ ID NO: 73267 - DNA, 80 bp, synthetic construct; identical to SEQ ID NO: 39324
  source 1..80: mol_type = other DNA

SEQ ID NO: 73268 - DNA, 80 bp, synthetic construct; identical to SEQ ID NO: 13708
  source 1..80: mol_type = other DNA

SEQ ID NO: 73269 - DNA, 80 bp, synthetic construct; identical to SEQ ID NO: 39326
  source 1..80: mol_type = other DNA

SEQ ID NO: 73270 - DNA, 80 bp, synthetic construct; identical to SEQ ID NO: 39327
  source 1..80: mol_type = other DNA

SEQ ID NO: 73271 - DNA, 80 bp, synthetic construct; identical to SEQ ID NO: 39328
  source 1..80: mol_type = other DNA

SEQ ID NO: 73272 - DNA, 80 bp, synthetic construct; identical to SEQ ID NO: 13709
  source 1..80: mol_type = other DNA

SEQ ID NO: 73273 - DNA, 80 bp, synthetic construct; identical to SEQ ID NO: 39330
  source 1..80: mol_type = other DNA

SEQ ID NO: 73274 - DNA, 80 bp, synthetic construct; identical to SEQ ID NO: 39331
  source 1..80: mol_type = other DNA

SEQ ID NO: 73275 - DNA, 80 bp, synthetic construct; identical to SEQ ID NO: 39332
  source 1..80: mol_type = other DNA

SEQ ID NO: 73276 - DNA, 80 bp, synthetic construct; identical to SEQ ID NO: 39333
  source 1..80: mol_type = other DNA

SEQ ID NO: 73277 - DNA, 80 bp, synthetic construct; identical to SEQ ID NO: 13710
  source 1..80: mol_type = other DNA

SEQ ID NO: 73278 - DNA, 80 bp, synthetic construct; identical to SEQ ID NO: 39335
  source 1..80: mol_type = other DNA

SEQ ID NO: 73279 - DNA, 80 bp, synthetic construct; identical to SEQ ID NO: 13711
  source 1..80: mol_type = other DNA

SEQ ID NO: 73280 - DNA, 80 bp, synthetic construct; identical to SEQ ID NO: 39337
  source 1..80: mol_type = other DNA

SEQ ID NO: 73281 - DNA, 80 bp, synthetic construct; identical to SEQ ID NO: 39338
  source 1..80: mol_type = other DNA

SEQ ID NO: 73282 - DNA, 80 bp, synthetic construct; identical to SEQ ID NO: 13712
  source 1..80: mol_type = other DNA

SEQ ID NO: 73283 - DNA, 80 bp, synthetic construct; identical to SEQ ID NO: 39342
  source 1..80: mol_type = other DNA

SEQ ID NO: 73284 - DNA, 80 bp, synthetic construct; identical to SEQ ID NO: 39343
  source 1..80: mol_type = other DNA

SEQ ID NO: 73285 - DNA, 80 bp, synthetic construct; identical to SEQ ID NO: 39344
  source 1..80: mol_type = other DNA

SEQ ID NO: 73286 - DNA, 80 bp, synthetic construct; identical to SEQ ID NO: 13713
  source 1..80: mol_type = other DNA

SEQ ID NO: 73287 - DNA, 80 bp, synthetic construct; identical to SEQ ID NO: 39346
  source 1..80: mol_type = other DNA

SEQ ID NO: 73288 - DNA, 80 bp, synthetic construct; identical to SEQ ID NO: 39347
  source 1..80: mol_type = other DNA

SEQ ID NO: 73289 - DNA, 80 bp, synthetic construct; identical to SEQ ID NO: 13714
  source 1..80: mol_type = other DNA

SEQ ID NO: 73290 - DNA, 80 bp, synthetic construct; identical to SEQ ID NO: 39349
  source 1..80: mol_type = other DNA

SEQ ID NO: 73291 - DNA, 80 bp, synthetic construct; identical to SEQ ID NO: 39350
  source 1..80: mol_type = other DNA

SEQ ID NO: 73292 - DNA, 80 bp, synthetic construct; identical to SEQ ID NO: 39351
  source 1..80: mol_type = other DNA

SEQ ID NO: 73293 - DNA, 80 bp, synthetic construct; identical to SEQ ID NO: 39352
  source 1..80: mol_type = other DNA

SEQ ID NO: 73294 - DNA, 80 bp, synthetic construct; identical to SEQ ID NO: 13715
  source 1..80: mol_type = other DNA

SEQ ID NO: 73295 - DNA, 80 bp, synthetic construct; identical to SEQ ID NO: 39354
  source 1..80: mol_type = other DNA

SEQ ID NO: 73296 - DNA, 80 bp, synthetic construct; identical to SEQ ID NO: 39355
  source 1..80: mol_type = other DNA

SEQ ID NO: 73297 - DNA, 80 bp, synthetic construct; identical to SEQ ID NO: 39356
  source 1..80: mol_type = other DNA

SEQ ID NO: 73298 - DNA, 80 bp, synthetic construct; identical to SEQ ID NO: 13716
  source 1..80: mol_type = other DNA

SEQ ID NO: 73299 - DNA, 80 bp, synthetic construct; identical to SEQ ID NO: 39358
  source 1..80: mol_type = other DNA

SEQ ID NO: 73300 - DNA, 80 bp, synthetic construct; identical to SEQ ID NO: 39359
  source 1..80: mol_type = other DNA

SEQ ID NO: 73301 - DNA, 80 bp, synthetic construct; identical to SEQ ID NO: 13717
  source 1..80: mol_type = other DNA

SEQ ID NO: 73302 - DNA, 80 bp, synthetic construct; identical to SEQ ID NO: 39362
  source 1..80: mol_type = other DNA

SEQ ID NO: 73303 - DNA, 80 bp, synthetic construct; identical to SEQ ID NO: 39363
  source 1..80: mol_type = other DNA

SEQ ID NO: 73304 - DNA, 80 bp, synthetic construct; identical to SEQ ID NO: 13718
  source 1..80: mol_type = other DNA

SEQ ID NO: 73305 - DNA, 80 bp, synthetic construct; identical to SEQ ID NO: 39365
  source 1..80: mol_type = other DNA

SEQ ID NO: 73306 - DNA, 80 bp, synthetic construct; identical to SEQ ID NO: 39366
  source 1..80: mol_type = other DNA

SEQ ID NO: 73307 - DNA, 80 bp, synthetic construct; identical to SEQ ID NO: 39367
  source 1..80: mol_type = other DNA

SEQ ID NO: 73308 - DNA, 80 bp, synthetic construct; identical to SEQ ID NO: 39368
  source 1..80: mol_type = other DNA

SEQ ID NO: 73309 - DNA, 80 bp, synthetic construct; identical to SEQ ID NO: 13719
  source 1..80: mol_type = other DNA

SEQ ID NO: 73310 - DNA, 80 bp, synthetic construct; identical to SEQ ID NO: 39370
  source 1..80: mol_type = other DNA

SEQ ID NO: 73311 - DNA, 80 bp, synthetic construct; identical to SEQ ID NO: 39371
  source 1..80: mol_type = other DNA

SEQ ID NO: 73312 - DNA, 80 bp, synthetic construct; identical to SEQ ID NO: 13720
  source 1..80: mol_type = other DNA

SEQ ID NO: 73313 - DNA, 80 bp, synthetic construct; identical to SEQ ID NO: 39373
  source 1..80: mol_type = other DNA

SEQ ID NO: 73314 - DNA, 80 bp, synthetic construct; identical to SEQ ID NO: 39374
  source 1..80: mol_type = other DNA

SEQ ID NO: 73315 - DNA, 80 bp, synthetic construct; identical to SEQ ID NO: 39375
  source 1..80: mol_type = other DNA

SEQ ID NO: 73316 - DNA, 80 bp, synthetic construct; identical to SEQ ID NO: 13721
  source 1..80: mol_type = other DNA

SEQ ID NO: 73317 - DNA, 80 bp, synthetic construct; identical to SEQ ID NO: 39377
  source 1..80: mol_type = other DNA

SEQ ID NO: 73318 - DNA, 80 bp, synthetic construct; identical to SEQ ID NO: 39378
  source 1..80: mol_type = other DNA

SEQ ID NO: 73319 - DNA, 80 bp, synthetic construct; identical to SEQ ID NO: 39379
  source 1..80: mol_type = other DNA

SEQ ID NO: 73320 - DNA, 80 bp, synthetic construct; identical to SEQ ID NO: 13722
  source 1..80: mol_type = other DNA

SEQ ID NO: 73321 - DNA, 80 bp, synthetic construct; identical to SEQ ID NO: 39381
  source 1..80: mol_type = other DNA

SEQ ID NO: 73322 - DNA, 80 bp, synthetic construct; identical to SEQ ID NO: 39382
  source 1..80: mol_type = other DNA

SEQ ID NO: 73323 - DNA, 80 bp, synthetic construct; identical to SEQ ID NO: 13723
  source 1..80: mol_type = other DNA

SEQ ID NO: 73324 - DNA, 80 bp, synthetic construct; identical to SEQ ID NO: 39384
  source 1..80: mol_type = other DNA

SEQ ID NO: 73325 - DNA, 80 bp, synthetic construct; identical to SEQ ID NO: 39385
  source 1..80: mol_type = other DNA

SEQ ID NO: 73326 - DNA, 80 bp, synthetic construct; identical to SEQ ID NO: 39386
  source 1..80: mol_type = other DNA

SEQ ID NO: 73327 - DNA, 80 bp, synthetic construct; identical to SEQ ID NO: 39387
  source 1..80: mol_type = other DNA

SEQ ID NO: 73328 - DNA, 80 bp, synthetic construct; identical to SEQ ID NO: 13724
  source 1..80: mol_type = other DNA

SEQ ID NO: 73329 - DNA, 80 bp, synthetic construct; identical to SEQ ID NO: 39389
  source 1..80: mol_type = other DNA

SEQ ID NO: 73330 - DNA, 80 bp, synthetic construct; identical to SEQ ID NO: 39390
  source 1..80: mol_type = other DNA

SEQ ID NO: 73331 - DNA, 80 bp, synthetic construct; identical to SEQ ID NO: 13725
  source 1..80: mol_type = other DNA

SEQ ID NO: 73332 - DNA, 80 bp, synthetic construct; identical to SEQ ID NO: 39392
  source 1..80: mol_type = other DNA

SEQ ID NO: 73333 - DNA, 80 bp, synthetic construct; identical to SEQ ID NO: 39394
  source 1..80: mol_type = other DNA

SEQ ID NO: 73334 - DNA, 80 bp, synthetic construct; identical to SEQ ID NO: 39395
  source 1..80: mol_type = other DNA

SEQ ID NO: 73335 - DNA, 80 bp, synthetic construct; identical to SEQ ID NO: 13726
  source 1..80: mol_type = other DNA

SEQ ID NO: 73336 - DNA, 80 bp, synthetic construct; identical to SEQ ID NO: 39398
  source 1..80: mol_type = other DNA

SEQ ID NO: 73337 - DNA, 80 bp, synthetic construct; identical to SEQ ID NO: 39399
  source 1..80: mol_type = other DNA

SEQ ID NO: 73338 - DNA, 80 bp, synthetic construct; identical to SEQ ID NO: 13727
  source 1..80: mol_type = other DNA

SEQ ID NO: 73339 - DNA, 80 bp, synthetic construct; identical to SEQ ID NO: 39401
  source 1..80: mol_type = other DNA

SEQ ID NO: 73340 - DNA, 80 bp, synthetic construct; identical to SEQ ID NO: 39402
  source 1..80: mol_type = other DNA

SEQ ID NO: 73341 - DNA, 80 bp, synthetic construct; identical to SEQ ID NO: 13728
  source 1..80: mol_type = other DNA

SEQ ID NO: 73342 - DNA, 80 bp, synthetic construct; identical to SEQ ID NO: 39404
  source 1..80: mol_type = other DNA

SEQ ID NO: 73343 - DNA, 80 bp, synthetic construct; identical to SEQ ID NO: 39405
  source 1..80: mol_type = other DNA

SEQ ID NO: 73344 - DNA, 80 bp, synthetic construct; identical to SEQ ID NO: 39406
  source 1..80: mol_type = other DNA

SEQ ID NO: 73345 - DNA, 80 bp, synthetic construct; identical to SEQ ID NO: 39407
  source 1..80: mol_type = other DNA

SEQ ID NO: 73346 - DNA, 80 bp, synthetic construct; identical to SEQ ID NO: 13729
  source 1..80: mol_type = other DNA

SEQ ID NO: 73347 - DNA, 80 bp, synthetic construct; identical to SEQ ID NO: 39409
  source 1..80: mol_type = other DNA

SEQ ID NO: 73348 - DNA, 80 bp, synthetic construct; identical to SEQ ID NO: 39410
  source 1..80: mol_type = other DNA

SEQ ID NO: 73349 - DNA, 80 bp, synthetic construct; identical to SEQ ID NO: 39411
  source 1..80: mol_type = other DNA

SEQ ID NO: 73350 - DNA, 80 bp, synthetic construct; identical to SEQ ID NO: 39412
  source 1..80: mol_type = other DNA

SEQ ID NO: 73351 - DNA, 80 bp, synthetic construct; identical to SEQ ID NO: 13730
  source 1..80: mol_type = other DNA

SEQ ID NO: 73352 - DNA, 80 bp, synthetic construct; identical to SEQ ID NO: 39414
  source 1..80: mol_type = other DNA

SEQ ID NO: 73353 - DNA, 80 bp, synthetic construct; identical to SEQ ID NO: 39415
  source 1..80: mol_type = other DNA

SEQ ID NO: 73354 - DNA, 80 bp, synthetic construct; identical to SEQ ID NO: 39416
  source 1..80: mol_type = other DNA

SEQ ID NO: 73355 - DNA, 80 bp, synthetic construct; identical to SEQ ID NO: 13731
  source 1..80: mol_type = other DNA

SEQ ID NO: 73356 - DNA, 80 bp, synthetic construct; identical to SEQ ID NO: 39418
  source 1..80: mol_type = other DNA

SEQ ID NO: 73357 - DNA, 80 bp, synthetic construct; identical to SEQ ID NO: 39419
  source 1..80: mol_type = other DNA

SEQ ID NO: 73358 - DNA, 80 bp, synthetic construct; identical to SEQ ID NO: 39420
  source 1..80: mol_type = other DNA

SEQ ID NO: 73359 - DNA, 80 bp, synthetic construct; identical to SEQ ID NO: 13732
  source 1..80: mol_type = other DNA

SEQ ID NO: 73360 - DNA, 80 bp, synthetic construct; identical to SEQ ID NO: 39422
  source 1..80: mol_type = other DNA

SEQ ID NO: 73361 - DNA, 80 bp, synthetic construct; identical to SEQ ID NO: 39423
  source 1..80: mol_type = other DNA

SEQ ID NO: 73362 - DNA, 80 bp, synthetic construct; identical to SEQ ID NO: 39424
  source 1..80: mol_type = other DNA

SEQ ID NO: 73363 - DNA, 80 bp, synthetic construct; identical to SEQ ID NO: 13733
  source 1..80: mol_type = other DNA

SEQ ID NO: 73364 - DNA, 80 bp, synthetic construct; identical to SEQ ID NO: 39426
  source 1..80: mol_type = other DNA

SEQ ID NO: 73365 - DNA, 80 bp, synthetic construct; identical to SEQ ID NO: 39427
  source 1..80: mol_type = other DNA

SEQ ID NO: 73366 - DNA, 80 bp, synthetic construct; identical to SEQ ID NO: 13734
  source 1..80: mol_type = other DNA

SEQ ID NO: 73367 - DNA, 80 bp, synthetic construct; identical to SEQ ID NO: 39429
  source 1..80: mol_type = other DNA

SEQ ID NO: 73368 - DNA, 80 bp, synthetic construct; identical to SEQ ID NO: 39430
  source 1..80: mol_type = other DNA

SEQ ID NO: 73369 - DNA, 80 bp, synthetic construct; identical to SEQ ID NO: 39431
  source 1..80: mol_type = other DNA

SEQ ID NO: 73370 - DNA, 80 bp, synthetic construct; identical to SEQ ID NO: 13735
  source 1..80: mol_type = other DNA

SEQ ID NO: 73371 - DNA, 80 bp, synthetic construct; identical to SEQ ID NO: 39433
  source 1..80: mol_type = other DNA

SEQ ID NO: 73372 - DNA, 80 bp, synthetic construct; identical to SEQ ID NO: 39434
  source 1..80: mol_type = other DNA

SEQ ID NO: 73373 - DNA, 80 bp, synthetic construct; identical to SEQ ID NO: 39436
  source 1..80: mol_type = other DNA

SEQ ID NO: 73374 - DNA, 80 bp, synthetic construct; identical to SEQ ID NO: 13736
  source 1..80: mol_type = other DNA

SEQ ID NO: 73375 - DNA, 80 bp, synthetic construct; identical to SEQ ID NO: 39438
  source 1..80: mol_type = other DNA

SEQ ID NO: 73376 - DNA, 80 bp, synthetic construct; identical to SEQ ID NO: 39439
  source 1..80: mol_type = other DNA

SEQ ID NO: 73377 - DNA, 80 bp, synthetic construct; identical to SEQ ID NO: 13737
  source 1..80: mol_type = other DNA

SEQ ID NO: 73378 - DNA, 80 bp, synthetic construct; identical to SEQ ID NO: 39441
  source 1..80: mol_type = other DNA

SEQ ID NO: 73379 - DNA, 80 bp, synthetic construct; identical to SEQ ID NO: 39442
  source 1..80: mol_type = other DNA

SEQ ID NO: 73380 - DNA, 80 bp, synthetic construct; identical to SEQ ID NO: 39443
  source 1..80: mol_type = other DNA

SEQ ID NO: 73381 - DNA, 80 bp, synthetic construct; identical to SEQ ID NO: 39444
  source 1..80: mol_type = other DNA

SEQ ID NO: 73382 - DNA, 80 bp, synthetic construct; identical to SEQ ID NO: 13738
  source 1..80: mol_type = other DNA

SEQ ID NO: 73383 - DNA, 80 bp, synthetic construct; identical to SEQ ID NO: 39446
  source 1..80: mol_type = other DNA

SEQ ID NO: 73384 - DNA, 80 bp, synthetic construct; identical to SEQ ID NO: 39447
  source 1..80: mol_type = other DNA

SEQ ID NO: 73385 - DNA, 80 bp, synthetic construct; identical to SEQ ID NO: 13739
  source 1..80: mol_type = other DNA

SEQ ID NO: 73386 - DNA, 80 bp, synthetic construct; identical to SEQ ID NO: 39449
  source 1..80: mol_type = other DNA

SEQ ID NO: 73387 - DNA, 80 bp, synthetic construct; identical to SEQ ID NO: 39450
  source 1..80: mol_type = other DNA

SEQ ID NO: 73388 - DNA, 80 bp, synthetic construct; identical to SEQ ID NO: 13740
  source 1..80: mol_type = other DNA

SEQ ID NO: 73389 - DNA, 80 bp, synthetic construct; identical to SEQ ID NO: 39453
  source 1..80: mol_type = other DNA

SEQ ID NO: 73390 - DNA, 80 bp, synthetic construct; identical to SEQ ID NO: 39454
  source 1..80: mol_type = other DNA

SEQ ID NO: 73391 - DNA, 80 bp, synthetic construct; identical to SEQ ID NO: 39455
  source 1..80: mol_type = other DNA

SEQ ID NO: 73392 - DNA, 80 bp, synthetic construct; identical to SEQ ID NO: 13741
  source 1..80: mol_type = other DNA

SEQ ID NO: 73393 - DNA, 80 bp, synthetic construct; identical to SEQ ID NO: 39457
  source 1..80: mol_type = other DNA

SEQ ID NO: 73394 - DNA, 80 bp, synthetic construct; identical to SEQ ID NO: 39458
  source 1..80: mol_type = other DNA

SEQ ID NO: 73395 - DNA, 80 bp, synthetic construct; identical to SEQ ID NO: 39459
  source 1..80: mol_type = other DNA

SEQ ID NO: 73396 - DNA, 80 bp, synthetic construct; identical to SEQ ID NO: 39460
  source 1..80: mol_type = other DNA

SEQ ID NO: 73397 - DNA, 80 bp, synthetic construct; identical to SEQ ID NO: 13742
  source 1..80: mol_type = other DNA

SEQ ID NO: 73398 - DNA, 80 bp, synthetic construct; identical to SEQ ID NO: 39462
  source 1..80: mol_type = other DNA

SEQ ID NO: 73399 - DNA, 80 bp, synthetic construct; identical to SEQ ID NO: 39463
  source 1..80: mol_type = other DNA

SEQ ID NO: 73400 - DNA, 80 bp, synthetic construct; identical to SEQ ID NO: 13743
  source 1..80: mol_type = other DNA

SEQ ID NO: 73401 - DNA, 80 bp, synthetic construct; identical to SEQ ID NO: 39465
  source 1..80: mol_type = other DNA

SEQ ID NO: 73402 - DNA, 80 bp, synthetic construct; identical to SEQ ID NO: 39466
  source 1..80: mol_type = other DNA

SEQ ID NO: 73403 - DNA, 80 bp, synthetic construct; identical to SEQ ID NO: 39467
  source 1..80: mol_type = other DNA

SEQ ID NO: 73404 - DNA, 80 bp, synthetic construct; identical to SEQ ID NO: 39468
  source 1..80: mol_type = other DNA

SEQ ID NO: 73405 - DNA, 80 bp, synthetic construct; identical to SEQ ID NO: 13744
  source 1..80: mol_type = other DNA

SEQ ID NO: 73406 - DNA, 80 bp, synthetic construct; identical to SEQ ID NO: 39470
  source 1..80: mol_type = other DNA

SEQ ID NO: 73407 - DNA, 80 bp, synthetic construct; identical to SEQ ID NO: 39471
  source 1..80: mol_type = other DNA

SEQ ID NO: 73408 - DNA, 80 bp, synthetic construct; identical to SEQ ID NO: 13745
  source 1..80: mol_type = other DNA

SEQ ID NO: 73409 - DNA, 80 bp, synthetic construct; identical to SEQ ID NO: 39473
  source 1..80: mol_type = other DNA

SEQ ID NO: 73410 - DNA, 80 bp, synthetic construct; identical to SEQ ID NO: 39474
  source 1..80: mol_type = other DNA

SEQ ID NO: 73411 - DNA, 80 bp, synthetic construct; identical to SEQ ID NO: 39475
  source 1..80: mol_type = other DNA

SEQ ID NO: 73412 - DNA, 80 bp, synthetic construct; identical to SEQ ID NO: 39476
  source 1..80: mol_type = other DNA

SEQ ID NO: 73413 - DNA, 80 bp, synthetic construct; identical to SEQ ID NO: 13746
  source 1..80: mol_type = other DNA

SEQ ID NO: 73414 - DNA, 80 bp, synthetic construct; identical to SEQ ID NO: 39478
  source 1..80: mol_type = other DNA

SEQ ID NO: 73415 - DNA, 80 bp, synthetic construct; identical to SEQ ID NO: 39479
  source 1..80: mol_type = other DNA

SEQ ID NO: 73416 - DNA, 80 bp, synthetic construct; identical to SEQ ID NO: 39480
  source 1..80: mol_type = other DNA

SEQ ID NO: 73417 - DNA, 80 bp, synthetic construct; identical to SEQ ID NO: 13747
  source 1..80: mol_type = other DNA

SEQ ID NO: 73418 - DNA, 80 bp, synthetic construct; identical to SEQ ID NO: 39482
  source 1..80: mol_type = other DNA

SEQ ID NO: 73419 - DNA, 80 bp, synthetic construct; identical to SEQ ID NO: 39483
  source 1..80: mol_type = other DNA

SEQ ID NO: 73420 - DNA, 80 bp, synthetic construct; identical to SEQ ID NO: 39484
  source 1..80: mol_type = other DNA

SEQ ID NO: 73421 - DNA, 80 bp, synthetic construct; identical to SEQ ID NO: 39485
  source 1..80: mol_type = other DNA

SEQ ID NO: 73422 - DNA, 80 bp, synthetic construct; identical to SEQ ID NO: 13748
  source 1..80: mol_type = other DNA

SEQ ID NO: 73423 - DNA, 80 bp, synthetic construct; identical to SEQ ID NO: 39487
  source 1..80: mol_type = other DNA

SEQ ID NO: 73424 - DNA, 80 bp, synthetic construct; identical to SEQ ID NO: 39488
  source 1..80: mol_type = other DNA

SEQ ID NO: 73425 - DNA, 80 bp, synthetic construct; identical to SEQ ID NO: 13749
  source 1..80: mol_type = other DNA

SEQ ID NO: 73426 - DNA, 80 bp, synthetic construct; identical to SEQ ID NO: 39490
  source 1..80: mol_type = other DNA

SEQ ID NO: 73427 - DNA, 80 bp, synthetic construct; identical to SEQ ID NO: 39491
  source 1..80: mol_type = other DNA

SEQ ID NO: 73428 - DNA, 80 bp, synthetic construct; identical to SEQ ID NO: 39492
  source 1..80: mol_type = other DNA

SEQ ID NO: 73429 - DNA, 80 bp, synthetic construct; identical to SEQ ID NO: 13750
  source 1..80: mol_type = other DNA

SEQ ID NO: 73430 - DNA, 80 bp, synthetic construct; identical to SEQ ID NO: 39494
  source 1..80: mol_type = other DNA

SEQ ID NO: 73431 - DNA, 80 bp, synthetic construct; identical to SEQ ID NO: 39495
  source 1..80: mol_type = other DNA

SEQ ID NO: 73432 - DNA, 80 bp, synthetic construct; identical to SEQ ID NO: 39496
  source 1..80: mol_type = other DNA

SEQ ID NO: 73433 - DNA, 80 bp, synthetic construct; identical to SEQ ID NO: 39497
  source 1..80: mol_type = other DNA

SEQ ID NO: 73434 - DNA, 80 bp, synthetic construct; identical to SEQ ID NO: 13751
  source 1..80: mol_type = other DNA

SEQ ID NO: 73435 - DNA, 80 bp, synthetic construct; identical to SEQ ID NO: 39499
  source 1..80: mol_type = other DNA

SEQ ID NO: 73436 - DNA, 80 bp, synthetic construct; identical to SEQ ID NO: 39500
  source 1..80: mol_type = other DNA

SEQ ID NO: 73437 - DNA, 80 bp, synthetic construct; identical to SEQ ID NO: 39501
  source 1..80: mol_type = other DNA

SEQ ID NO: 73438 - DNA, 80 bp, synthetic construct; identical to SEQ ID NO: 39502
  source 1..80: mol_type = other DNA

SEQ ID NO: 73439 - DNA, 80 bp, synthetic construct; identical to SEQ ID NO: 13752
  source 1..80: mol_type = other DNA

SEQ ID NO: 73440 - DNA, 80 bp, synthetic construct; identical to SEQ ID NO: 39504
  source 1..80: mol_type = other DNA

SEQ ID NO: 73441 - DNA, 80 bp, synthetic construct; identical to SEQ ID NO: 39505
  source 1..80: mol_type = other DNA

SEQ ID NO: 73442 - DNA, 80 bp, synthetic construct; identical to SEQ ID NO: 39506
  source 1..80: mol_type = other DNA

SEQ ID NO: 73443 - DNA, 80 bp, synthetic construct; identical to SEQ ID NO: 13753
  source 1..80: mol_type = other DNA

SEQ ID NO: 73444 - DNA, 80 bp, synthetic construct; identical to SEQ ID NO: 39508
  source 1..80: mol_type = other DNA

SEQ ID NO: 73445 - DNA, 80 bp, synthetic construct; identical to SEQ ID NO: 39509
  source 1..80: mol_type = other DNA

SEQ ID NO: 73446 - DNA, 80 bp, synthetic construct; identical to SEQ ID NO: 39510
  source 1..80: mol_type = other DNA

SEQ ID NO: 73447 - DNA, 80 bp, synthetic construct; identical to SEQ ID NO: 13754
  source 1..80: mol_type = other DNA

SEQ ID NO: 73448 - DNA, 80 bp, synthetic construct; identical to SEQ ID NO: 39512
  source 1..80: mol_type = other DNA

SEQ ID NO: 73449 - DNA, 80 bp, synthetic construct; identical to SEQ ID NO: 39513
  source 1..80: mol_type = other DNA

SEQ ID NO: 73450 - DNA, 80 bp, synthetic construct; identical to SEQ ID NO: 13755
  source 1..80: mol_type = other DNA

SEQ ID NO: 73451 - DNA, 80 bp, synthetic construct; identical to SEQ ID NO: 39515
  source 1..80: mol_type = other DNA

SEQ ID NO: 73452 - DNA, 80 bp, synthetic construct; identical to SEQ ID NO: 39516
  source 1..80: mol_type = other DNA

SEQ ID NO: 73453 - DNA, 80 bp, synthetic construct; identical to SEQ ID NO: 39517
  source 1..80: mol_type = other DNA

SEQ ID NO: 73454 - DNA, 80 bp, synthetic construct; identical to SEQ ID NO: 13756
  source 1..80: mol_type = other DNA

SEQ ID NO: 73455 - DNA, 80 bp, synthetic construct; identical to SEQ ID NO: 39519
  source 1..80: mol_type = other DNA

SEQ ID NO: 73456 - DNA, 80 bp, synthetic construct; identical to SEQ ID NO: 39520
  source 1..80: mol_type = other DNA

SEQ ID NO: 73457 - DNA, 80 bp, synthetic construct; identical to SEQ ID NO: 39521
  source 1..80: mol_type = other DNA

SEQ ID NO: 73458 - DNA, 80 bp, synthetic construct; identical to SEQ ID NO: 39522
  source 1..80: mol_type = other DNA

SEQ ID NO: 73459 - DNA, 80 bp, synthetic construct; identical to SEQ ID NO: 13757
  source 1..80: mol_type = other DNA

SEQ ID NO: 73460 - DNA, 80 bp, synthetic construct; identical to SEQ ID NO: 39524
  source 1..80: mol_type = other DNA

SEQ ID NO: 73461 - DNA, 80 bp, synthetic construct; identical to SEQ ID NO: 39525
  source 1..80: mol_type = other DNA

SEQ ID NO: 73462 - DNA, 80 bp, synthetic construct; identical to SEQ ID NO: 13758
  source 1..80: mol_type = other DNA

SEQ ID NO: 73463 - DNA, 80 bp, synthetic construct; identical to SEQ ID NO: 39527
  source 1..80: mol_type = other DNA

SEQ ID NO: 73464 - DNA, 80 bp, synthetic construct; identical to SEQ ID NO: 39528
  source 1..80: mol_type = other DNA

SEQ ID NO: 73465 - DNA, 80 bp, synthetic construct; identical to SEQ ID NO: 39529
  source 1..80: mol_type = other DNA

SEQ ID NO: 73466 - DNA, 80 bp, synthetic construct; identical to SEQ ID NO: 39530
  source 1..80: mol_type = other DNA

SEQ ID NO: 73467 - DNA, 80 bp, synthetic construct; identical to SEQ ID NO: 13759
  source 1..80: mol_type = other DNA

SEQ ID NO: 73468 - DNA, 80 bp, synthetic construct; identical to SEQ ID NO: 39532
  source 1..80: mol_type = other DNA

SEQ ID NO: 73469 - DNA, 80 bp, synthetic construct; identical to SEQ ID NO: 39533
  source 1..80: mol_type = other DNA

SEQ ID NO: 73470 - DNA, 80 bp, synthetic construct; identical to SEQ ID NO: 13760
  source 1..80: mol_type = other DNA

SEQ ID NO: 73471 - DNA, 80 bp, synthetic construct; identical to SEQ ID NO: 39536
  source 1..80: mol_type = other DNA

SEQ ID NO: 73472 - DNA, 80 bp, synthetic construct; identical to SEQ ID NO: 39537
  source 1..80: mol_type = other DNA

SEQ ID NO: 73473 - DNA, 80 bp, synthetic construct; identical to SEQ ID NO: 39538
  source 1..80: mol_type = other DNA

SEQ ID NO: 73474 - DNA, 80 bp, synthetic construct; identical to SEQ ID NO: 39539
  source 1..80: mol_type = other DNA

SEQ ID NO: 73475 - DNA, 80 bp, synthetic construct; identical to SEQ ID NO: 13761
  source 1..80: mol_type = other DNA

SEQ ID NO: 73476 - DNA, 80 bp, synthetic construct; identical to SEQ ID NO: 39542
  source 1..80: mol_type = other DNA

SEQ ID NO: 73477 - DNA, 80 bp, synthetic construct; identical to SEQ ID NO: 39543
  source 1..80: mol_type = other DNA

SEQ ID NO: 73478 - DNA, 80 bp, synthetic construct; identical to SEQ ID NO: 13762
  source 1..80: mol_type = other DNA

SEQ ID NO: 73479 - DNA, 80 bp, synthetic construct; identical to SEQ ID NO: 39545
  source 1..80: mol_type = other DNA

SEQ ID NO: 73480 - DNA, 80 bp, synthetic construct; identical to SEQ ID NO: 39546
  source 1..80: mol_type = other DNA

SEQ ID NO: 73481 - DNA, 80 bp, synthetic construct; identical to SEQ ID NO: 13763
  source 1..80: mol_type = other DNA

SEQ ID NO: 73482 - DNA, 80 bp, synthetic construct; identical to SEQ ID NO: 39548
  source 1..80: mol_type = other DNA

SEQ ID NO: 73483 - DNA, 80 bp, synthetic construct; identical to SEQ ID NO: 39549
  source 1..80: mol_type = other DNA

SEQ ID NO: 73484 - DNA, 80 bp, synthetic construct; identical to SEQ ID NO: 39550
  source 1..80: mol_type = other DNA

SEQ ID NO: 73485 - DNA, 80 bp, synthetic construct; identical to SEQ ID NO: 13764
  source 1..80: mol_type = other DNA

SEQ ID NO: 73486 - DNA, 80 bp, synthetic construct; identical to SEQ ID NO: 39552
  source 1..80: mol_type = other DNA

SEQ ID NO: 73487 - DNA, 80 bp, synthetic construct; identical to SEQ ID NO: 39553
  source 1..80: mol_type = other DNA

SEQ ID NO: 73488 - DNA, 80 bp, synthetic construct; identical to SEQ ID NO: 39554
  source 1..80: mol_type = other DNA

SEQ ID NO: 73489 - DNA, 80 bp, synthetic construct; identical to SEQ ID NO: 13765
  source 1..80: mol_type = other DNA

SEQ ID NO: 73490 - DNA, 80 bp, synthetic construct; identical to SEQ ID NO: 39556
  source 1..80: mol_type = other DNA

SEQ ID NO: 73491 - DNA, 80 bp, synthetic construct; identical to SEQ ID NO: 39557
  source 1..80: mol_type = other DNA

SEQ ID NO: 73492 - DNA, 80 bp, synthetic construct; identical to SEQ ID NO: 39558
  source 1..80: mol_type = other DNA

SEQ ID NO: 73493 - DNA, 80 bp, synthetic construct; identical to SEQ ID NO: 39559
  source 1..80: mol_type = other DNA

SEQ ID NO: 73494 - DNA, 80 bp, synthetic construct; identical to SEQ ID NO: 13766
  source 1..80: mol_type = other DNA

SEQ ID NO: 73495 - DNA, 80 bp, synthetic construct; identical to SEQ ID NO: 39561
  source 1..80: mol_type = other DNA

SEQ ID NO: 73496 - DNA, 80 bp, synthetic construct; identical to SEQ ID NO: 39562
  source 1..80: mol_type = other DNA

SEQ ID NO: 73497 - DNA, 80 bp, synthetic construct; identical to SEQ ID NO: 13767
  source 1..80: mol_type = other DNA

SEQ ID NO: 73498 - DNA, 80 bp, synthetic construct; identical to SEQ ID NO: 39565
  source 1..80: mol_type = other DNA

SEQ ID NO: 73499 - DNA, 80 bp, synthetic construct; identical to SEQ ID NO: 39566
  source 1..80: mol_type = other DNA

SEQ ID NO: 73500 - DNA, 80 bp, synthetic construct; identical to SEQ ID NO: 39567
  source 1..80: mol_type = other DNA

SEQ ID NO: 73501 - DNA, 80 bp, synthetic construct; identical to SEQ ID NO: 13768
  source 1..80: mol_type = other DNA

SEQ ID NO: 73502 - DNA, 80 bp, synthetic construct; identical to SEQ ID NO: 39569
  source 1..80: mol_type = other DNA

SEQ ID NO: 73503 - DNA, 80 bp, synthetic construct; identical to SEQ ID NO: 39570
  source 1..80: mol_type = other DNA

SEQ ID NO: 73504 - DNA, 80 bp, synthetic construct; identical to SEQ ID NO: 39571
  source 1..80: mol_type = other DNA

SEQ ID NO: 73505 - DNA, 80 bp, synthetic construct; identical to SEQ ID NO: 13769
  source 1..80: mol_type = other DNA

SEQ ID NO: 73506 - DNA, 80 bp, synthetic construct; identical to SEQ ID NO: 39573
  source 1..80: mol_type = other DNA

SEQ ID NO: 73507 - DNA, 80 bp, synthetic construct; identical to SEQ ID NO: 39574
  source 1..80: mol_type = other DNA

SEQ ID NO: 73508 - DNA, 80 bp, synthetic construct; identical to SEQ ID NO: 39575
  source 1..80: mol_type = other DNA

SEQ ID NO: 73509 - DNA, 80 bp, synthetic construct; identical to SEQ ID NO: 13770
  source 1..80: mol_type = other DNA

SEQ ID NO: 73510 - DNA, 80 bp, synthetic construct; identical to SEQ ID NO: 39577
  source 1..80: mol_type = other DNA

SEQ ID NO: 73511 - DNA, 80 bp, synthetic construct; identical to SEQ ID NO: 39578
  source 1..80: mol_type = other DNA

SEQ ID NO: 73512 - DNA, 80 bp, synthetic construct; identical to SEQ ID NO: 39579
  source 1..80: mol_type = other DNA

SEQ ID NO: 73513 - DNA, 80 bp, synthetic construct; identical to SEQ ID NO: 13771
  source 1..80: mol_type = other DNA

SEQ ID NO: 73514 - DNA, 80 bp, synthetic construct; identical to SEQ ID NO: 39581
  source 1..80: mol_type = other DNA

SEQ ID NO: 73515 - DNA, 80 bp, synthetic construct; identical to SEQ ID NO: 39582
  source 1..80: mol_type = other DNA

SEQ ID NO: 73516 - DNA, 80 bp, synthetic construct; identical to SEQ ID NO: 39583
  source 1..80: mol_type = other DNA

SEQ ID NO: 73517 - DNA, 80 bp, synthetic construct; identical to SEQ ID NO: 39584
  source 1..80: mol_type = other DNA

SEQ ID NO: 73518 - DNA, 80 bp, synthetic construct; identical to SEQ ID NO: 13772
  source 1..80: mol_type = other DNA

SEQ ID NO: 73519 - DNA, 80 bp, synthetic construct; identical to SEQ ID NO: 39586
  source 1..80: mol_type = other DNA

SEQ ID NO: 73520 - DNA, 80 bp, synthetic construct; identical to SEQ ID NO: 39587
  source 1..80: mol_type = other DNA

SEQ ID NO: 73521 - DNA, 80 bp, synthetic construct; identical to SEQ ID NO: 13773
  source 1..80: mol_type = other DNA

SEQ ID NO: 73522 - DNA, 80 bp, synthetic construct; identical to SEQ ID NO: 39589
  source 1..80: mol_type = other DNA

SEQ ID NO: 73523 - DNA, 80 bp, synthetic construct; identical to SEQ ID NO: 39590
  source 1..80: mol_type = other DNA

SEQ ID NO: 73524 - DNA, 80 bp, synthetic construct; identical to SEQ ID NO: 39591
  source 1..80: mol_type = other DNA

SEQ ID NO: 73525 - DNA, 80 bp, synthetic construct; identical to SEQ ID NO: 39592
  source 1..80: mol_type = other DNA

SEQ ID NO: 73526 - DNA, 80 bp, synthetic construct; identical to SEQ ID NO: 13774
  source 1..80: mol_type = other DNA

SEQ ID NO: 73527 - DNA, 80 bp, synthetic construct; identical to SEQ ID NO: 39594
  source 1..80: mol_type = other DNA

SEQ ID NO: 73528 - DNA, 80 bp, synthetic construct; identical to SEQ ID NO: 39595
  source 1..80: mol_type = other DNA

SEQ ID NO: 73529 - DNA, 80 bp, synthetic construct; identical to SEQ ID NO: 13775
  source 1..80: mol_type = other DNA

SEQ ID NO: 73530 - DNA, 80 bp, synthetic construct; identical to SEQ ID NO: 39597
  source 1..80: mol_type = other DNA

SEQ ID NO: 73531 - DNA, 80 bp, synthetic construct; identical to SEQ ID NO: 13776
  source 1..80: mol_type = other DNA

SEQ ID NO: 73532 - DNA, 80 bp, synthetic construct; identical to SEQ ID NO: 39599
  source 1..80: mol_type = other DNA

SEQ ID NO: 73533 - DNA, 80 bp, synthetic construct; identical to SEQ ID NO: 39601
  source 1..80: mol_type = other DNA

SEQ ID NO: 73534 - DNA, 80 bp, synthetic construct; identical to SEQ ID NO: 39602
  source 1..80: mol_type = other DNA

SEQ ID NO: 73535 - DNA, 80 bp, synthetic construct; identical to SEQ ID NO: 13777
  source 1..80: mol_type = other DNA

SEQ ID NO: 73536 - DNA, 80 bp, synthetic construct; identical to SEQ ID NO: 39604
  source 1..80: mol_type = other DNA

SEQ ID NO: 73537 - DNA, 80 bp, synthetic construct; identical to SEQ ID NO: 39605
  source 1..80: mol_type = other DNA

SEQ ID NO: 73538 - DNA, 80 bp, synthetic construct; identical to SEQ ID NO: 39606
  source 1..80: mol_type = other DNA

SEQ ID NO: 73539 - DNA, 80 bp, synthetic construct; identical to SEQ ID NO: 13778
  source 1..80: mol_type = other DNA

SEQ ID NO: 73540 - DNA, 80 bp, synthetic construct; identical to SEQ ID NO: 39608
  source 1..80: mol_type = other DNA

SEQ ID NO: 73541 - DNA, 80 bp, synthetic construct; identical to SEQ ID NO: 39609
  source 1..80: mol_type = other DNA

SEQ ID NO: 73542 - DNA, 80 bp, synthetic construct; identical to SEQ ID NO: 39611
  source 1..80: mol_type = other DNA

SEQ ID NO: 73543 - DNA, 80 bp, synthetic construct; identical to SEQ ID NO: 39612
  source 1..80: mol_type = other DNA

SEQ ID NO: 73544 - DNA, 80 bp, synthetic construct; identical to SEQ ID NO: 39613
  source 1..80: mol_type = other DNA

SEQ ID NO: 73545 - DNA, 80 bp, synthetic construct; identical to SEQ ID NO: 39614
  source 1..80: mol_type = other DNA

SEQ ID NO: 73546 - DNA, 80 bp, synthetic construct; identical to SEQ ID NO: 13780
  source 1..80: mol_type = other DNA

SEQ ID NO: 73547 - DNA, 80 bp, synthetic construct; identical to SEQ ID NO: 39617
  source 1..80: mol_type = other DNA

SEQ ID NO: 73548 - DNA, 80 bp, synthetic construct; identical to SEQ ID NO: 39618
  source 1..80: mol_type = other DNA

SEQ ID NO: 73549 - DNA, 80 bp, synthetic construct; identical to SEQ ID NO: 13781
  source 1..80: mol_type = other DNA

SEQ ID NO: 73550 - DNA, 80 bp, synthetic construct; identical to SEQ ID NO: 39620
  source 1..80: mol_type = other DNA

SEQ ID NO: 73551 - DNA, 80 bp, synthetic construct; identical to SEQ ID NO: 39621
  source 1..80: mol_type = other DNA

SEQ ID NO: 73552 - DNA, 80 bp, synthetic construct; identical to SEQ ID NO: 13782
  source 1..80: mol_type = other DNA

SEQ ID NO: 73553 - DNA, 80 bp, synthetic construct; identical to SEQ ID NO: 39624
  source 1..80: mol_type = other DNA

SEQ ID NO: 73554 - DNA, 80 bp, synthetic construct; identical to SEQ ID NO: 39625
  source 1..80: mol_type = other DNA

SEQ ID NO: 73555 - DNA, 80 bp, synthetic construct; identical to SEQ ID NO: 13783
  source 1..80: mol_type = other DNA

SEQ ID NO: 73556 - DNA, 80 bp, synthetic construct; identical to SEQ ID NO: 39627
  source 1..80: mol_type = other DNA

SEQ ID NO: 73557 - DNA, 80 bp, synthetic construct; identical to SEQ ID NO: 39628
  source 1..80: mol_type = other DNA

SEQ ID NO: 73558 - DNA, 80 bp, synthetic construct; identical to SEQ ID NO: 39629
  source 1..80: mol_type = other DNA

SEQ ID NO: 73559 - DNA, 80 bp, synthetic construct; identical to SEQ ID NO: 39630
  source 1..80: mol_type = other DNA

SEQ ID NO: 73560 - DNA, 80 bp, synthetic construct; identical to SEQ ID NO: 13784
  source 1..80: mol_type = other DNA

SEQ ID NO: 73561 - DNA, 80 bp, synthetic construct; identical to SEQ ID NO: 39632
  source 1..80: mol_type = other DNA

SEQ ID NO: 73562 - DNA, 80 bp, synthetic construct; identical to SEQ ID NO: 13785
  source 1..80: mol_type = other DNA

SEQ ID NO: 73563 - DNA, 80 bp, synthetic construct; identical to SEQ ID NO: 39635
  source 1..80: mol_type = other DNA

SEQ ID NO: 73564 - DNA, 80 bp, synthetic construct; identical to SEQ ID NO: 39636
  source 1..80: mol_type = other DNA

SEQ ID NO: 73565 - DNA, 80 bp, synthetic construct; identical to SEQ ID NO: 39637
  source 1..80: mol_type = other DNA

SEQ ID NO: 73566 - DNA, 80 bp, synthetic construct; identical to SEQ ID NO: 39638
  source 1..80: mol_type = other DNA

SEQ ID NO: 73567 - DNA, 80 bp, synthetic construct; identical to SEQ ID NO: 13786
  source 1..80: mol_type = other DNA

SEQ ID NO: 73568 - DNA, 80 bp, synthetic construct; identical to SEQ ID NO: 39640
  source 1..80: mol_type = other DNA

SEQ ID NO: 73569 - DNA, 80 bp, synthetic construct; identical to SEQ ID NO: 39641
  source 1..80: mol_type = other DNA

SEQ ID NO: 73570 - DNA, 80 bp, synthetic construct; identical to SEQ ID NO: 39642
  source 1..80: mol_type = other DNA

SEQ ID NO: 73571 - DNA, 80 bp, synthetic construct; identical to SEQ ID NO: 13787
  source 1..80: mol_type = other DNA

SEQ ID NO: 73572 - DNA, 80 bp, synthetic construct; identical to SEQ ID NO: 39644
  source 1..80: mol_type = other DNA

SEQ ID NO: 73573 - DNA, 80 bp, synthetic construct; identical to SEQ ID NO: 39645
  source 1..80: mol_type = other DNA

SEQ ID NO: 73574 - DNA, 80 bp, synthetic construct; identical to SEQ ID NO: 39646
  source 1..80: mol_type = other DNA

SEQ ID NO: 73575 - DNA, 80 bp, synthetic construct; identical to SEQ ID NO: 13788
  source 1..80: mol_type = other DNA

SEQ ID NO: 73576 - DNA, 80 bp, synthetic construct; identical to SEQ ID NO: 39648
  source 1..80: mol_type = other DNA

SEQ ID NO: 73577 - DNA, 80 bp, synthetic construct; identical to SEQ ID NO: 39649
  source 1..80: mol_type = other DNA

SEQ ID NO: 73578 - DNA, 80 bp, synthetic construct; identical to SEQ ID NO: 39650
  source 1..80: mol_type = other DNA

SEQ ID NO: 73579 - DNA, 80 bp, synthetic construct; identical to SEQ ID NO: 13789
  source 1..80: mol_type = other DNA

SEQ ID NO: 73580 - DNA, 80 bp, synthetic construct; identical to SEQ ID NO: 39652
  source 1..80: mol_type = other DNA

SEQ ID NO: 73581 - DNA, 80 bp, synthetic construct; identical to SEQ ID NO: 39653
  source 1..80: mol_type = other DNA

SEQ ID NO: 73582 - DNA, 80 bp, synthetic construct; identical to SEQ ID NO: 13790
  source 1..80: mol_type = other DNA

SEQ ID NO: 73583 - DNA, 80 bp, synthetic construct; identical to SEQ ID NO: 39655
  source 1..80: mol_type = other DNA

SEQ ID NO: 73584 - DNA, 80 bp, synthetic construct; identical to SEQ ID NO: 39656
  source 1..80: mol_type = other DNA

SEQ ID NO: 73585 - DNA, 80 bp, synthetic construct; identical to SEQ ID NO: 39657
  source 1..80: mol_type = other DNA

SEQ ID NO: 73586 - DNA, 80 bp, synthetic construct; identical to SEQ ID NO: 39658
  source 1..80: mol_type = other DNA

SEQ ID NO: 73587 - DNA, 80 bp, synthetic construct; identical to SEQ ID NO: 13791
  source 1..80: mol_type = other DNA

SEQ ID NO: 73588 - DNA, 80 bp, synthetic construct; identical to SEQ ID NO: 39660
  source 1..80: mol_type = other DNA

SEQ ID NO: 73589 - DNA, 80 bp, synthetic construct; identical to SEQ ID NO: 39661
  source 1..80: mol_type = other DNA

SEQ ID NO: 73590 - DNA, 80 bp, synthetic construct; identical to SEQ ID NO: 39662
  source 1..80: mol_type = other DNA

SEQ ID NO: 73591 - DNA, 80 bp, synthetic construct; identical to SEQ ID NO: 13792
  source 1..80: mol_type = other DNA

SEQ ID NO: 73592 - DNA, 80 bp, synthetic construct; identical to SEQ ID NO: 39664
  source 1..80: mol_type = other DNA

SEQ ID NO: 73593 - DNA, 80 bp, synthetic construct; identical to SEQ ID NO: 39665
  source 1..80: mol_type = other DNA

SEQ ID NO: 73594 - DNA, 80 bp, synthetic construct; identical to SEQ ID NO: 39666
  source 1..80: mol_type = other DNA

SEQ ID NO: 73595 - DNA, 80 bp, synthetic construct; identical to SEQ ID NO: 13793
  source 1..80: mol_type = other DNA

SEQ ID NO: 73596 - DNA, 80 bp, synthetic construct; identical to SEQ ID NO: 39668
  source 1..80: mol_type = other DNA

SEQ ID NO: 73597 - DNA, 80 bp, synthetic construct; identical to SEQ ID NO: 39669
  source 1..80: mol_type = other DNA

SEQ ID NO: 73598 - DNA, 80 bp, synthetic construct; identical to SEQ ID NO: 13794
  source 1..80: mol_type = other DNA

SEQ ID NO: 73599 - DNA, 80 bp, synthetic construct; identical to SEQ ID NO: 39671
  source 1..80: mol_type = other DNA

SEQ ID NO: 73600 - DNA, 80 bp, synthetic construct; identical to SEQ ID NO: 39672
  source 1..80: mol_type = other DNA

SEQ ID NO: 73601 - DNA, 80 bp, synthetic construct; identical to SEQ ID NO: 39673
  source 1..80: mol_type = other DNA

SEQ ID NO: 73602 - DNA, 80 bp, synthetic construct; identical to SEQ ID NO: 13795
  source 1..80: mol_type = other DNA

SEQ ID NO: 73603 - DNA, 80 bp, synthetic construct; identical to SEQ ID NO: 39675
  source 1..80: mol_type = other DNA

SEQ ID NO: 73604 - DNA, 80 bp, synthetic construct; identical to SEQ ID NO: 39676
  source 1..80: mol_type = other DNA

SEQ ID NO: 73605 - DNA, 80 bp, synthetic construct; identical to SEQ ID NO: 39677
  source 1..80: mol_type = other DNA

SEQ ID NO: 73606 - DNA, 80 bp, synthetic construct; identical to SEQ ID NO: 13796
  source 1..80: mol_type = other DNA

SEQ ID NO: 73607 - DNA, 80 bp, synthetic construct; identical to SEQ ID NO: 39679
  source 1..80: mol_type = other DNA

SEQ ID NO: 73608 - DNA, 80 bp, synthetic construct; identical to SEQ ID NO: 39680
  source 1..80: mol_type = other DNA

SEQ ID NO: 73609 - DNA, 80 bp, synthetic construct; identical to SEQ ID NO: 13797
  source 1..80: mol_type = other DNA

SEQ ID NO: 73610 - DNA, 80 bp, synthetic construct; identical to SEQ ID NO: 39683
  source 1..80: mol_type = other DNA

SEQ ID NO: 73611 - DNA, 80 bp, synthetic construct; identical to SEQ ID NO: 39684
  source 1..80: mol_type = other DNA

SEQ ID NO: 73612 - DNA, 80 bp, synthetic construct; identical to SEQ ID NO: 39685
  source 1..80: mol_type = other DNA

SEQ ID NO: 73613 - DNA, 80 bp, synthetic construct; identical to SEQ ID NO: 13798
  source 1..80: mol_type = other DNA

SEQ ID NO: 73614 - DNA, 80 bp, synthetic construct; identical to SEQ ID NO: 39687
  source 1..80: mol_type = other DNA

SEQ ID NO: 73615 - DNA, 80 bp, synthetic construct; identical to SEQ ID NO: 39688
  source 1..80: mol_type = other DNA

SEQ ID NO: 73616 - DNA, 80 bp, synthetic construct; identical to SEQ ID NO: 39689
  source 1..80: mol_type = other DNA

SEQ ID NO: 73617 - DNA, 80 bp, synthetic construct; identical to SEQ ID NO: 39690
  source 1..80: mol_type = other DNA

SEQ ID NO: 73618 - DNA, 80 bp, synthetic construct; identical to SEQ ID NO: 13799
  source 1..80: mol_type = other DNA

SEQ ID NO: 73619 - DNA, 80 bp, synthetic construct; identical to SEQ ID NO: 39692
  source 1..80: mol_type = other DNA

SEQ ID NO: 73620 - DNA, 80 bp, synthetic construct; identical to SEQ ID NO: 39693
  source 1..80: mol_type = other DNA

SEQ ID NO: 73621 - DNA, 80 bp, synthetic construct; identical to SEQ ID NO: 13800
  source 1..80: mol_type = other DNA

SEQ ID NO: 73622 - DNA, 80 bp, synthetic construct; identical to SEQ ID NO: 39695
  source 1..80: mol_type = other DNA

SEQ ID NO: 73623 - DNA, 80 bp, synthetic construct; identical to SEQ ID NO: 39696
  source 1..80: mol_type = other DNA

SEQ ID NO: 73624 - DNA, 80 bp, synthetic construct; identical to SEQ ID NO: 39697
  source 1..80: mol_type = other DNA

SEQ ID NO: 73625 - DNA, 80 bp, synthetic construct; identical to SEQ ID NO: 13801
  source 1..80: mol_type = other DNA

SEQ ID NO: 73626 - DNA, 80 bp, synthetic construct; identical to SEQ ID NO: 39699
  source 1..80: mol_type = other DNA

SEQ ID NO: 73627 - DNA, 80 bp, synthetic construct; identical to SEQ ID NO: 39700
  source 1..80: mol_type = other DNA

SEQ ID NO: 73628 - DNA, 80 bp, synthetic construct; identical to SEQ ID NO: 39701
  source 1..80: mol_type = other DNA

SEQ ID NO: 73629 - DNA, 80 bp, synthetic construct; identical to SEQ ID NO: 13802
  source 1..80: mol_type = other DNA

SEQ ID NO: 73630 - DNA, 80 bp, synthetic construct; identical to SEQ ID NO: 39703
  source 1..80: mol_type = other DNA

SEQ ID NO: 73631 - DNA, 80 bp, synthetic construct; identical to SEQ ID NO: 39704
  source 1..80: mol_type = other DNA

SEQ ID NO: 73632 - DNA, 80 bp, synthetic construct; identical to SEQ ID NO: 39705
  source 1..80: mol_type = other DNA

SEQ ID NO: 73633 - DNA, 80 bp, synthetic construct; identical to SEQ ID NO: 13803
  source 1..80: mol_type = other DNA

SEQ ID NO: 73634 - DNA, 80 bp, synthetic construct; identical to SEQ ID NO: 39707
  source 1..80: mol_type = other DNA

SEQ ID NO: 73635 - DNA, 80 bp, synthetic construct; identical to SEQ ID NO: 39708
  source 1..80: mol_type = other DNA

SEQ ID NO: 73636 - DNA, 80 bp, synthetic construct; identical to SEQ ID NO: 39709
  source 1..80: mol_type = other DNA

SEQ ID NO: 73637 - DNA, 80 bp, synthetic construct; identical to SEQ ID NO: 13804
  source 1..80: mol_type = other DNA

SEQ ID NO: 73638 - DNA, 80 bp, synthetic construct; identical to SEQ ID NO: 39711
  source 1..80: mol_type = other DNA

SEQ ID NO: 73639 - DNA, 80 bp, synthetic construct; identical to SEQ ID NO: 39712
  source 1..80: mol_type = other DNA

SEQ ID NO: 73640 - DNA, 80 bp, synthetic construct; identical to SEQ ID NO: 39713
  source 1..80: mol_type = other DNA

SEQ ID NO: 73641 - DNA, 80 bp, synthetic construct; identical to SEQ ID NO: 39714
  source 1..80: mol_type = other DNA

SEQ ID NO: 73642 - DNA, 80 bp, synthetic construct; identical to SEQ ID NO: 13805
  source 1..80: mol_type = other DNA

SEQ ID NO: 73643 - DNA, 80 bp, synthetic construct; identical to SEQ ID NO: 39716
  source 1..80: mol_type = other DNA

SEQ ID NO: 73644 - DNA, 80 bp, synthetic construct; identical to SEQ ID NO: 39717
  source 1..80: mol_type = other DNA

SEQ ID NO: 73645 - DNA, 80 bp, synthetic construct; identical to SEQ ID NO: 13806
  source 1..80: mol_type = other DNA

SEQ ID NO: 73646 - DNA, 80 bp, synthetic construct; identical to SEQ ID NO: 39719
  source 1..80: mol_type = other DNA

SEQ ID NO: 73647 - DNA, 80 bp, synthetic construct; identical to SEQ ID NO: 39720
  source 1..80: mol_type = other DNA

SEQ ID NO: 73648 - DNA, 80 bp, synthetic construct; identical to SEQ ID NO: 39721
  source 1..80: mol_type = other DNA

SEQ ID NO: 73649 - DNA, 80 bp, synthetic construct; identical to SEQ ID NO: 39722
  source 1..80: mol_type = other DNA

SEQ ID NO: 73650 - DNA, 80 bp, synthetic construct; identical to SEQ ID NO: 13807
  source 1..80: mol_type = other DNA

SEQ ID NO: 73651 - DNA, 80 bp, synthetic construct; identical to SEQ ID NO: 39724
  source 1..80: mol_type = other DNA

SEQ ID NO: 73652 - DNA, 80 bp, synthetic construct; identical to SEQ ID NO: 39725
  source 1..80: mol_type = other DNA

SEQ ID NO: 73653 - DNA, 80 bp, synthetic construct; identical to SEQ ID NO: 13808
  source 1..80: mol_type = other DNA

SEQ ID NO: 73654 - DNA, 80 bp, synthetic construct; identical to SEQ ID NO: 39728
  source 1..80: mol_type = other DNA

SEQ ID NO: 73655 - DNA, 80 bp, synthetic construct; identical to SEQ ID NO: 39729
  source 1..80: mol_type = other DNA

SEQ ID NO: 73656 - DNA, 80 bp, synthetic construct; identical to SEQ ID NO: 13809
  source 1..80: mol_type = other DNA

SEQ ID NO: 73657 - DNA, 80 bp, synthetic construct; identical to SEQ ID NO: 39731
  source 1..80: mol_type = other DNA

SEQ ID NO: 73658 - DNA, 80 bp, synthetic construct; identical to SEQ ID NO: 39732
  source 1..80: mol_type = other DNA

SEQ ID NO: 73659 - DNA, 80 bp, synthetic construct; identical to SEQ ID NO: 39733
  source 1..80: mol_type = other DNA

SEQ ID NO: 73660 - DNA, 80 bp, synthetic construct; identical to SEQ ID NO: 39734
  source 1..80: mol_type = other DNA

SEQ ID NO: 73661 - DNA, 80 bp, synthetic construct; identical to SEQ ID NO: 13810
  source 1..80: mol_type = other DNA

SEQ ID NO: 73662 - DNA, 80 bp, synthetic construct; identical to SEQ ID NO: 39736
  source 1..80: mol_type = other DNA

SEQ ID NO: 73663 - DNA, 80 bp, synthetic construct; identical to SEQ ID NO: 39737
  source 1..80: mol_type = other DNA

SEQ ID NO: 73664 - DNA, 80 bp, synthetic construct; identical to SEQ ID NO: 13811
  source 1..80: mol_type = other DNA

SEQ ID NO: 73665 - DNA, 80 bp, synthetic construct; identical to SEQ ID NO: 39739
  source 1..80: mol_type = other DNA

SEQ ID NO: 73666 - DNA, 80 bp, synthetic construct; identical to SEQ ID NO: 39740
  source 1..80: mol_type = other DNA

SEQ ID NO: 73667 - DNA, 80 bp, synthetic construct; identical to SEQ ID NO: 39741
  source 1..80: mol_type = other DNA

SEQ ID NO: 73668 - DNA, 80 bp, synthetic construct; identical to SEQ ID NO: 39742
  source 1..80: mol_type = other DNA

SEQ ID NO: 73669 - DNA, 80 bp, synthetic construct; identical to SEQ ID NO: 13812
  source 1..80: mol_type = other DNA

SEQ ID NO: 73670 - DNA, 80 bp, synthetic construct; identical to SEQ ID NO: 39744
  source 1..80: mol_type = other DNA

SEQ ID NO: 73671 - DNA, 80 bp, synthetic construct; identical to SEQ ID NO: 39745
  source 1..80: mol_type = other DNA

SEQ ID NO: 73672 - DNA, 80 bp, synthetic construct; identical to SEQ ID NO: 39746
  source 1..80: mol_type = other DNA

SEQ ID NO: 73673 - DNA, 80 bp, synthetic construct; identical to SEQ ID NO: 13813
  source 1..80: mol_type = other DNA

SEQ ID NO: 73674 - DNA, 80 bp, synthetic construct; identical to SEQ ID NO: 39748
  source 1..80: mol_type = other DNA

SEQ ID NO: 73675 - DNA, 80 bp, synthetic construct; identical to SEQ ID NO: 39749
  source 1..80: mol_type = other DNA

SEQ ID NO: 73676 - DNA, 80 bp, synthetic construct; identical to SEQ ID NO: 39750
  source 1..80: mol_type = other DNA

SEQ ID NO: 73677 - DNA, 80 bp, synthetic construct; identical to SEQ ID NO: 13814
  source 1..80: mol_type = other DNA

SEQ ID NO: 73678 - DNA, 80 bp, synthetic construct; identical to SEQ ID NO: 39752
  source 1..80: mol_type = other DNA

SEQ ID NO: 73679 - DNA, 80 bp, synthetic construct; identical to SEQ ID NO: 39753
  source 1..80: mol_type = other DNA

SEQ ID NO: 73680 - DNA, 80 bp, synthetic construct; identical to SEQ ID NO: 39754
  source 1..80: mol_type = other DNA

SEQ ID NO: 73681 - DNA, 80 bp, synthetic construct; identical to SEQ ID NO: 13815
  source 1..80: mol_type = other DNA

SEQ ID NO: 73682 - DNA, 80 bp, synthetic construct; identical to SEQ ID NO: 39756
  source 1..80: mol_type = other DNA

SEQ ID NO: 73683 - DNA, 80 bp, synthetic construct; identical to SEQ ID NO: 39757
  source 1..80: mol_type = other DNA

SEQ ID NO: 73684 - DNA, 80 bp, synthetic construct; identical to SEQ ID NO: 13816
  source 1..80: mol_type = other DNA

SEQ ID NO: 73685 - DNA, 80 bp, synthetic construct; identical to SEQ ID NO: 39759
  source 1..80: mol_type = other DNA

SEQ ID NO: 73686 - DNA, 80 bp, synthetic construct; identical to SEQ ID NO: 39760
  source 1..80: mol_type = other DNA

SEQ ID NO: 73687 - DNA, 80 bp, synthetic construct; identical to SEQ ID NO: 39761
  source 1..80: mol_type = other DNA

SEQ ID NO: 73688 - DNA, 80 bp, synthetic construct; identical to SEQ ID NO: 13817
  source 1..80: mol_type = other DNA

SEQ ID NO: 73689 - DNA, 80 bp, synthetic construct; identical to SEQ ID NO: 39763
  source 1..80: mol_type = other DNA

SEQ ID NO: 73690 - DNA, 80 bp, synthetic construct; identical to SEQ ID NO: 39764
  source 1..80: mol_type = other DNA

SEQ ID NO: 73691 - DNA, 80 bp, synthetic construct; identical to SEQ ID NO: 39765
  source 1..80: mol_type = other DNA

SEQ ID NO: 73692 - DNA, 80 bp, synthetic construct; identical to SEQ ID NO: 13818
  source 1..80: mol_type = other DNA

SEQ ID NO: 73693 - DNA, 80 bp, synthetic construct; identical to SEQ ID NO: 39767
  source 1..80: mol_type = other DNA

SEQ ID NO: 73694 - DNA, 80 bp, synthetic construct; identical to SEQ ID NO: 39768
  source 1..80: mol_type = other DNA

SEQ ID NO: 73695 - DNA, 80 bp, synthetic construct; identical to SEQ ID NO: 39769
  source 1..80: mol_type = other DNA

SEQ ID NO: 73696 - DNA, 80 bp, synthetic construct; identical to SEQ ID NO: 13819
  source 1..80: mol_type = other DNA

SEQ ID NO: 73697 - DNA, 80 bp, synthetic construct; identical to SEQ ID NO: 39772
  source 1..80: mol_type = other DNA

SEQ ID NO: 73698 - DNA, 80 bp, synthetic construct; identical to SEQ ID NO: 39773
  source 1..80: mol_type = other DNA

SEQ ID NO: 73699 - DNA, 80 bp, synthetic construct; identical to SEQ ID NO: 39774
  source 1..80: mol_type = other DNA

SEQ ID NO: 73700 - DNA, 80 bp, synthetic construct; identical to SEQ ID NO: 13820
  source 1..80: mol_type = other DNA

SEQ ID NO: 73701 - DNA, 80 bp, synthetic construct; identical to SEQ ID NO: 39776
  source 1..80: mol_type = other DNA

SEQ ID NO: 73702 - DNA, 80 bp, synthetic construct; identical to SEQ ID NO: 39777
  source 1..80: mol_type = other DNA

SEQ ID NO: 73703 - DNA, 80 bp, synthetic construct; identical to SEQ ID NO: 13821
  source 1..80: mol_type = other DNA

SEQ ID NO: 73704 - DNA, 80 bp, synthetic construct; identical to SEQ ID NO: 39779
  source 1..80: mol_type = other DNA

SEQ ID NO: 73705 - DNA, 80 bp, synthetic construct; identical to SEQ ID NO: 39780
  source 1..80: mol_type = other DNA

SEQ ID NO: 73706 - DNA, 80 bp, synthetic construct; identical to SEQ ID NO: 39781
  source 1..80: mol_type = other DNA

SEQ ID NO: 73707 - DNA, 80 bp, synthetic construct; identical to SEQ ID NO: 39782
  source 1..80: mol_type = other DNA

SEQ ID NO: 73708 - DNA, 80 bp, synthetic construct; identical to SEQ ID NO: 39783
  source 1..80: mol_type = other DNA

SEQ ID NO: 73709 - DNA, 80 bp, synthetic construct; identical to SEQ ID NO: 13822
  source 1..80: mol_type = other DNA

SEQ ID NO: 73710 - DNA, 80 bp, synthetic construct; identical to SEQ ID NO: 39785
  source 1..80: mol_type = other DNA

SEQ ID NO: 73711 - DNA, 80 bp, synthetic construct; identical to SEQ ID NO: 39786
  source 1..80: mol_type = other DNA

SEQ ID NO: 73712 - DNA, 80 bp, synthetic construct; identical to SEQ ID NO: 13823
  source 1..80: mol_type = other DNA

SEQ ID NO: 73713 - DNA, 80 bp, synthetic construct; identical to SEQ ID NO: 39789
  source 1..80: mol_type = other DNA

SEQ ID NO: 73714 - DNA, 80 bp, synthetic construct; identical to SEQ ID NO: 39790
  source 1..80: mol_type = other DNA

SEQ ID NO: 73715 - DNA, 80 bp, synthetic construct; identical to SEQ ID NO: 13824
  source 1..80: mol_type = other DNA

SEQ ID NO: 73716 - DNA, 80 bp, synthetic construct; identical to SEQ ID NO: 39792
  source 1..80: mol_type = other DNA

SEQ ID NO: 73717 - DNA, 80 bp, synthetic construct; identical to SEQ ID NO: 39793
  source 1..80: mol_type = other DNA

SEQ ID NO: 73718 - DNA, 80 bp, synthetic construct; identical to SEQ ID NO: 39794
  source 1..80: mol_type = other DNA

SEQ ID NO: 73719 - DNA, 80 bp, synthetic construct; identical to SEQ ID NO: 39795
  source 1..80: mol_type = other DNA

SEQ ID NO: 73720 - DNA, 80 bp, synthetic construct; identical to SEQ ID NO: 13825
  source 1..80: mol_type = other DNA

SEQ ID NO: 73721 - DNA, 80 bp, synthetic construct; identical to SEQ ID NO: 39797
  source 1..80: mol_type = other DNA

SEQ ID NO: 73722 - DNA, 80 bp, synthetic construct; identical to SEQ ID NO: 39798
  source 1..80: mol_type = other DNA

SEQ ID NO: 73723 - DNA, 80 bp, synthetic construct; identical to SEQ ID NO: 39799
  source 1..80: mol_type = other DNA

SEQ ID NO: 73724 - DNA, 80 bp, synthetic construct; identical to SEQ ID NO: 13826
  source 1..80: mol_type = other DNA

SEQ ID NO: 73725 - DNA, 80 bp, synthetic construct; identical to SEQ ID NO: 39801
  source 1..80: mol_type = other DNA

SEQ ID NO: 73726 - DNA, 80 bp, synthetic construct; identical to SEQ ID NO: 39802
  source 1..80: mol_type = other DNA

SEQ ID NO: 73727 - DNA, 80 bp, synthetic construct; identical to SEQ ID NO: 39803
  source 1..80: mol_type = other DNA

SEQ ID NO: 73728 - DNA, 80 bp, synthetic construct; identical to SEQ ID NO: 39804
  source 1..80: mol_type = other DNA

SEQ ID NO: 73729 - DNA, 80 bp, synthetic construct; identical to SEQ ID NO: 13827
  source 1..80: mol_type = other DNA

SEQ ID NO: 73730 - DNA, 80 bp, synthetic construct; identical to SEQ ID NO: 39806
  source 1..80: mol_type = other DNA

SEQ ID NO: 73731 - DNA, 80 bp, synthetic construct; identical to SEQ ID NO: 39807
  source 1..80: mol_type = other DNA

SEQ ID NO: 73732 - DNA, 80 bp, synthetic construct; identical to SEQ ID NO: 13828
  source 1..80: mol_type = other DNA

SEQ ID NO: 73733 - DNA, 80 bp, synthetic construct; identical to SEQ ID NO: 39809
  source 1..80: mol_type = other DNA

SEQ ID NO: 73734 - DNA, 80 bp, synthetic construct; identical to SEQ ID NO: 39810
  source 1..80: mol_type = other DNA

SEQ ID NO: 73735 - DNA, 80 bp, synthetic construct; identical to SEQ ID NO: 39811
  source 1..80: mol_type = other DNA

SEQ ID NO: 73736 - DNA, 80 bp, synthetic construct; identical to SEQ ID NO: 13829
  source 1..80: mol_type = other DNA

SEQ ID NO: 73737 - DNA, 80 bp, synthetic construct; identical to SEQ ID NO: 39813
  source 1..80: mol_type = other DNA

SEQ ID NO: 73738 - DNA, 80 bp, synthetic construct; identical to SEQ ID NO: 39814
  source 1..80: mol_type = other DNA

SEQ ID NO: 73739 - DNA, 80 bp, synthetic construct; identical to SEQ ID NO: 39815
  source 1..80: mol_type = other DNA

SEQ ID NO: 73740 - DNA, 80 bp, synthetic construct; identical to SEQ ID NO: 39816
  source 1..80: mol_type = other DNA

SEQ ID NO: 73741 - DNA, 80 bp, synthetic construct; identical to SEQ ID NO: 13830
  source 1..80: mol_type = other DNA

SEQ ID NO: 73742 - DNA, 80 bp, synthetic construct; identical to SEQ ID NO: 39818
  source 1..80: mol_type = other DNA

SEQ ID NO: 73743 - DNA, 80 bp, synthetic construct; identical to SEQ ID NO: 39819
  source 1..80: mol_type = other DNA

SEQ ID NO: 73744 - DNA, 80 bp, synthetic construct; identical to SEQ ID NO: 39820
  source 1..80: mol_type = other DNA

SEQ ID NO: 73745 - DNA, 80 bp, synthetic construct; identical to SEQ ID NO: 13831
  source 1..80: mol_type = other DNA

SEQ ID NO: 73746 - DNA, 80 bp, synthetic construct; identical to SEQ ID NO: 39822
  source 1..80: mol_type = other DNA

SEQ ID NO: 73747 - DNA, 80 bp, synthetic construct; identical to SEQ ID NO: 39823
  source 1..80: mol_type = other DNA

SEQ ID NO: 73748 - DNA, 80 bp, synthetic construct; identical to SEQ ID NO: 39824
  source 1..80: mol_type = other DNA

SEQ ID NO: 73749 - DNA, 80 bp, synthetic construct; identical to SEQ ID NO: 13832
  source 1..80: mol_type = other DNA

SEQ ID NO: 73750 - DNA, 80 bp, synthetic construct; identical to SEQ ID NO: 39826
  source 1..80: mol_type = other DNA

SEQ ID NO: 73751 - DNA, 80 bp, synthetic construct; identical to SEQ ID NO: 39827
  source 1..80: mol_type = other DNA

SEQ ID NO: 73752 - DNA, 80 bp, synthetic construct; identical to SEQ ID NO: 39828
  source 1..80: mol_type = other DNA

SEQ ID NO: 73753 - DNA, 80 bp, synthetic construct; identical to SEQ ID NO: 39829
  source 1..80: mol_type = other DNA

SEQ ID NO: 73754 - DNA, 80 bp, synthetic construct; identical to SEQ ID NO: 13833
  source 1..80: mol_type = other DNA

SEQ ID NO: 73755 - DNA, 80 bp, synthetic construct; identical to SEQ ID NO: 39831
  source 1..80: mol_type = other DNA

SEQ ID NO: 73756 - DNA, 80 bp, synthetic construct; identical to SEQ ID NO: 39832
  source 1..80: mol_type = other DNA

SEQ ID NO: 73757 - DNA, 80 bp, synthetic construct; identical to SEQ ID NO: 39833
  source 1..80: mol_type = other DNA

SEQ ID NO: 73758 - DNA, 80 bp, synthetic construct; identical to SEQ ID NO: 13834
  source 1..80: mol_type = other DNA

SEQ ID NO: 73759 - DNA, 80 bp, synthetic construct; identical to SEQ ID NO: 39835
  source 1..80: mol_type = other DNA

SEQ ID NO: 73760 - DNA, 80 bp, synthetic construct; identical to SEQ ID NO: 39836
  source 1..80: mol_type = other DNA

SEQ ID NO: 73761 - DNA, 80 bp, synthetic construct; identical to SEQ ID NO: 39837
  source 1..80: mol_type = other DNA

SEQ ID NO: 73762 - DNA, 80 bp, synthetic construct; identical to SEQ ID NO: 13835
  source 1..80: mol_type = other DNA

SEQ ID NO: 73763 - DNA, 80 bp, synthetic construct; identical to SEQ ID NO: 39839
  source 1..80: mol_type = other DNA

SEQ ID NO: 73764 - DNA, 80 bp, synthetic construct; identical to SEQ ID NO: 39840
  source 1..80: mol_type = other DNA

SEQ ID NO: 73765 - DNA, 80 bp, synthetic construct; identical to SEQ ID NO: 39841
  source 1..80: mol_type = other DNA

SEQ ID NO: 73766 - DNA, 80 bp, synthetic construct; identical to SEQ ID NO: 13836
  source 1..80: mol_type = other DNA

SEQ ID NO: 73767 - DNA, 80 bp, synthetic construct; identical to SEQ ID NO: 39843
  source 1..80: mol_type = other DNA

SEQ ID NO: 73768 - DNA, 80 bp, synthetic construct; identical to SEQ ID NO: 39844
  source 1..80: mol_type = other DNA

SEQ ID NO: 73769 - DNA, 80 bp, synthetic construct; identical to SEQ ID NO: 39845
  source 1..80: mol_type = other DNA

SEQ ID NO: 73770 - DNA, 80 bp, synthetic construct; identical to SEQ ID NO: 13837
  source 1..80: mol_type = other DNA

SEQ ID NO: 73771 - DNA, 80 bp, synthetic construct; identical to SEQ ID NO: 39847
  source 1..80: mol_type = other DNA

SEQ ID NO: 73772 - DNA, 80 bp, synthetic construct; identical to SEQ ID NO: 39848
  source 1..80: mol_type = other DNA

SEQ ID NO: 73773 - DNA, 80 bp, synthetic construct; identical to SEQ ID NO: 39849
  source 1..80: mol_type = other DNA

SEQ ID NO: 73774 - DNA, 80 bp, synthetic construct; identical to SEQ ID NO: 39850
  source 1..80: mol_type = other DNA

SEQ ID NO: 73775 - DNA, 80 bp, synthetic construct; identical to SEQ ID NO: 13838
  source 1..80: mol_type = other DNA

SEQ ID NO: 73776 - DNA, 80 bp, synthetic construct; identical to SEQ ID NO: 39852
  source 1..80: mol_type = other DNA

SEQ ID NO: 73777 - DNA, 80 bp, synthetic construct; identical to SEQ ID NO: 39853
  source 1..80: mol_type = other DNA

SEQ ID NO: 73778 - DNA, 80 bp, synthetic construct; identical to SEQ ID NO: 13839
  source 1..80: mol_type = other DNA

SEQ ID NO: 73779 - DNA, 80 bp, synthetic construct; identical to SEQ ID NO: 39855
  source 1..80: mol_type = other DNA

SEQ ID NO: 73780 - DNA, 80 bp, synthetic construct; identical to SEQ ID NO: 39856
  source 1..80: mol_type = other DNA

SEQ ID NO: 73781 - DNA, 80 bp, synthetic construct; identical to SEQ ID NO: 39857
  source 1..80: mol_type = other DNA

SEQ ID NO: 73782 - DNA, 80 bp, synthetic construct; identical to SEQ ID NO: 39858
  source 1..80: mol_type = other DNA

SEQ ID NO: 73783 - DNA, 80 bp, synthetic construct; identical to SEQ ID NO: 13840
  source 1..80: mol_type = other DNA

SEQ ID NO: 73784 - DNA, 80 bp, synthetic construct; identical to SEQ ID NO: 39860
  source 1..80: mol_type = other DNA

SEQ ID NO: 73785 - DNA, 80 bp, synthetic construct; identical to SEQ ID NO: 39861
  source 1..80: mol_type = other DNA

SEQ ID NO: 73786 - DNA, 80 bp, synthetic construct; identical to SEQ ID NO: 13841
  source 1..80: mol_type = other DNA

SEQ ID NO: 73787 - DNA, 80 bp, synthetic construct; identical to SEQ ID NO: 39864
  source 1..80: mol_type = other DNA

SEQ ID NO: 73788 - DNA, 80 bp, synthetic construct; identical to SEQ ID NO: 39865
  source 1..80: mol_type = other DNA

SEQ ID NO: 73789 - DNA, 80 bp, synthetic construct; identical to SEQ ID NO: 39866
  source 1..80: mol_type = other DNA

SEQ ID NO: 73790 - DNA, 80 bp, synthetic construct; identical to SEQ ID NO: 13842
  source 1..80: mol_type = other DNA

SEQ ID NO: 73791 - DNA, 80 bp, synthetic construct; identical to SEQ ID NO: 39868
  source 1..80: mol_type = other DNA

SEQ ID NO: 73792 - DNA, 80 bp, synthetic construct; identical to SEQ ID NO: 39869
  source 1..80: mol_type = other DNA

SEQ ID NO: 73793 - DNA, 80 bp, synthetic construct; identical to SEQ ID NO: 39870
  source 1..80: mol_type = other DNA

SEQ ID NO: 73794 - DNA, 80 bp, synthetic construct; identical to SEQ ID NO: 13843
  source 1..80: mol_type = other DNA

SEQ ID NO: 73795 - DNA, 80 bp, synthetic construct; identical to SEQ ID NO: 39872
  source 1..80: mol_type = other DNA

SEQ ID NO: 73796 - DNA, 80 bp, synthetic construct; identical to SEQ ID NO: 39873
  source 1..80: mol_type = other DNA

SEQ ID NO: 73797 - DNA, 80 bp, synthetic construct; identical to SEQ ID NO: 39874
  source 1..80: mol_type = other DNA

SEQ ID NO: 73798 - DNA, 80 bp, synthetic construct; identical to SEQ ID NO: 13844
  source 1..80: mol_type = other DNA

SEQ ID NO: 73799 - DNA, 80 bp, synthetic construct; identical to SEQ ID NO: 39876
  source 1..80: mol_type = other DNA

SEQ ID NO: 73800 - DNA, 80 bp, synthetic construct; identical to SEQ ID NO: 39877
  source 1..80: mol_type = other DNA

SEQ ID NO: 73801 - DNA, 80 bp, synthetic construct; identical to SEQ ID NO: 39878
  source 1..80: mol_type = other DNA

SEQ ID NO: 73802 - DNA, 80 bp, synthetic construct; identical to SEQ ID NO: 13845
  source 1..80: mol_type = other DNA

SEQ ID NO: 73803 - DNA, 80 bp, synthetic construct; identical to SEQ ID NO: 39880
  source 1..80: mol_type = other DNA

SEQ ID NO: 73804 - DNA, 80 bp, synthetic construct; identical to SEQ ID NO: 39881
  source 1..80: mol_type = other DNA

SEQ ID NO: 73805 - DNA, 80 bp, synthetic construct; identical to SEQ ID NO: 13846
  source 1..80: mol_type = other DNA

SEQ ID NO: 73806 - DNA, 80 bp, synthetic construct; identical to SEQ ID NO: 39883
  source 1..80: mol_type = other DNA

SEQ ID NO: 73807 - DNA, 80 bp, synthetic construct; identical to SEQ ID NO: 39884
  source 1..80: mol_type = other DNA

SEQ ID NO: 73808 - DNA, 80 bp, synthetic construct; identical to SEQ ID NO: 39885
  source 1..80: mol_type = other DNA

SEQ ID NO: 73809 - DNA, 80 bp, synthetic construct; identical to SEQ ID NO: 13847
  source 1..80: mol_type = other DNA

SEQ ID NO: 73810 - DNA, 80 bp, synthetic construct; identical to SEQ ID NO: 39887
  source 1..80: mol_type = other DNA

SEQ ID NO: 73811 - DNA, 80 bp, synthetic construct; identical to SEQ ID NO: 39889
  source 1..80: mol_type = other DNA

SEQ ID NO: 73812 - DNA, 80 bp, synthetic construct; identical to SEQ ID NO: 39890
  source 1..80: mol_type = other DNA

SEQ ID NO: 73813 - DNA, 80 bp, synthetic construct; identical to SEQ ID NO: 13848
  source 1..80: mol_type = other DNA

SEQ ID NO: 73814 - DNA, 80 bp, synthetic construct; identical to SEQ ID NO: 39892
  source 1..80: mol_type = other DNA

SEQ ID NO: 73815 - DNA, 80 bp, synthetic construct; identical to SEQ ID NO: 39893
  source 1..80: mol_type = other DNA

SEQ ID NO: 73816 - DNA, 80 bp, synthetic construct; identical to SEQ ID NO: 39894
  source 1..80: mol_type = other DNA

SEQ ID NO: 73817 - DNA, 80 bp, synthetic construct; identical to SEQ ID NO: 13849
  source 1..80: mol_type = other DNA

SEQ ID NO: 73818 - DNA, 80 bp, synthetic construct; identical to SEQ ID NO: 39896
  source 1..80: mol_type = other DNA

SEQ ID NO: 73819 - DNA, 80 bp, synthetic construct; identical to SEQ ID NO: 39897
  source 1..80: mol_type = other DNA

SEQ ID NO: 73820 - DNA, 80 bp, synthetic construct; identical to SEQ ID NO: 13850
  source 1..80: mol_type = other DNA

SEQ ID NO: 73821 - DNA, 80 bp, synthetic construct; identical to SEQ ID NO: 39899
  source 1..80: mol_type = other DNA

SEQ ID NO: 73822 - DNA, 80 bp, synthetic construct; identical to SEQ ID NO: 39900
  source 1..80: mol_type = other DNA

SEQ ID NO: 73823 - DNA, 80 bp, synthetic construct; identical to SEQ ID NO: 39901
  source 1..80: mol_type = other DNA

SEQ ID NO: 73824 - DNA, 80 bp, synthetic construct; identical to SEQ ID NO: 13851
  source 1..80: mol_type = other DNA

SEQ ID NO: 73825 - DNA, 80 bp, synthetic construct; identical to SEQ ID NO: 39904
  source 1..80: mol_type = other DNA

SEQ ID NO: 73826 - DNA, 80 bp, synthetic construct; identical to SEQ ID NO: 39905
  source 1..80: mol_type = other DNA

SEQ ID NO: 73827 - DNA, 80 bp, synthetic construct; identical to SEQ ID NO: 39906
  source 1..80: mol_type = other DNA

SEQ ID NO: 73828 - DNA, 80 bp, synthetic construct; identical to SEQ ID NO: 13852
  source 1..80: mol_type = other DNA

SEQ ID NO: 73829 - DNA, 80 bp, synthetic construct; identical to SEQ ID NO: 39908
  source 1..80: mol_type = other DNA

SEQ ID NO: 73830 - DNA, 80 bp, synthetic construct; identical to SEQ ID NO: 39909
  source 1..80: mol_type = other DNA

SEQ ID NO: 73831 - DNA, 80 bp, synthetic construct; identical to SEQ ID NO: 13853
  source 1..80: mol_type = other DNA

SEQ ID NO: 73832 - DNA, 80 bp, synthetic construct; identical to SEQ ID NO: 39911
  source 1..80: mol_type = other DNA

SEQ ID NO: 73833 - DNA, 80 bp, synthetic construct; identical to SEQ ID NO: 39912
  source 1..80: mol_type = other DNA

SEQ ID NO: 73834 - DNA, 80 bp, synthetic construct; identical to SEQ ID NO: 39913
  source 1..80: mol_type = other DNA

SEQ ID NO: 73835 - DNA, 80 bp, synthetic construct; identical to SEQ ID NO: 39914
  source 1..80: mol_type = other DNA

SEQ ID NO: 73836 - DNA, 80 bp, synthetic construct; identical to SEQ ID NO: 13854
  source 1..80: mol_type = other DNA

SEQ ID NO: 73837 - DNA, 80 bp, synthetic construct; identical to SEQ ID NO: 39916
  source 1..80: mol_type = other DNA

SEQ ID NO: 73838 - DNA, 80 bp, synthetic construct; identical to SEQ ID NO: 39917
  source 1..80: mol_type = other DNA

SEQ ID NO: 73839 - DNA, 80 bp, synthetic construct; identical to SEQ ID NO: 13855
  source 1..80: mol_type = other DNA

SEQ ID NO: 73840 - DNA, 80 bp, synthetic construct; identical to SEQ ID NO: 39919
  source 1..80: mol_type = other DNA

SEQ ID NO: 73841 - DNA, 80 bp, synthetic construct; identical to SEQ ID NO: 39921
  source 1..80: mol_type = other DNA

SEQ ID NO: 73842 - DNA, 80 bp, synthetic construct; identical to SEQ ID NO: 13856
  source 1..80: mol_type = other DNA

SEQ ID NO: 73843 - DNA, 80 bp, synthetic construct; identical to SEQ ID NO: 39923
  source 1..80: mol_type = other DNA

SEQ ID NO: 73844 - DNA, 80 bp, synthetic construct; identical to SEQ ID NO: 39924
  source 1..80: mol_type = other DNA

SEQ ID NO: 73845 - DNA, 80 bp, synthetic construct; identical to SEQ ID NO: 39925
  source 1..80: mol_type = other DNA

SEQ ID NO: 73846 - DNA, 80 bp, synthetic construct; identical to SEQ ID NO: 13857
  source 1..80: mol_type = other DNA

SEQ ID NO: 73847 - DNA, 80 bp, synthetic construct; identical to SEQ ID NO: 39927
  source 1..80: mol_type = other DNA

SEQ ID NO: 73848 - DNA, 80 bp, synthetic construct; identical to SEQ ID NO: 39928
  source 1..80: mol_type = other DNA

SEQ ID NO: 73849 - DNA, 80 bp, synthetic construct; identical to SEQ ID NO: 39929
  source 1..80: mol_type = other DNA

SEQ ID NO: 73850 - DNA, 80 bp, synthetic construct; identical to SEQ ID NO: 13858
  source 1..80: mol_type = other DNA

SEQ ID NO: 73851 - DNA, 80 bp, synthetic construct; identical to SEQ ID NO: 39931
  source 1..80: mol_type = other DNA

SEQ ID NO: 73852 - DNA, 80 bp, synthetic construct; identical to SEQ ID NO: 39932
  source 1..80: mol_type = other DNA

SEQ ID NO: 73853 - DNA, 80 bp, synthetic construct; identical to SEQ ID NO: 39933
  source 1..80: mol_type = other DNA

SEQ ID NO: 73854 - DNA, 80 bp, synthetic construct; identical to SEQ ID NO: 13859
  source 1..80: mol_type = other DNA

SEQ ID NO: 73855 - DNA, 80 bp, synthetic construct; identical to SEQ ID NO: 39935
  source 1..80: mol_type = other DNA

SEQ ID NO: 73856 - DNA, 80 bp, synthetic construct; identical to SEQ ID NO: 39936
  source 1..80: mol_type = other DNA

SEQ ID NO: 73857 - DNA, 80 bp, synthetic construct; identical to SEQ ID NO: 39937
  source 1..80: mol_type = other DNA

SEQ ID NO: 73858 - DNA, 80 bp, synthetic construct; identical to SEQ ID NO: 39938
  source 1..80: mol_type = other DNA

SEQ ID NO: 73859 - DNA, 80 bp, synthetic construct; identical to SEQ ID NO: 13860
  source 1..80: mol_type = other DNA

SEQ ID NO: 73860 - DNA, 80 bp, synthetic construct; identical to SEQ ID NO: 39940
  source 1..80: mol_type = other DNA

SEQ ID NO: 73861 - DNA, 80 bp, synthetic construct; identical to SEQ ID NO: 39941
  source 1..80: mol_type = other DNA

SEQ ID NO: 73862 - DNA, 80 bp, synthetic construct; identical to SEQ ID NO: 39942
  source 1..80: mol_type = other DNA

SEQ ID NO: 73863 - DNA, 80 bp, synthetic construct; identical to SEQ ID NO: 13861
  source 1..80: mol_type = other DNA

SEQ ID NO: 73864 - DNA, 80 bp, synthetic construct; identical to SEQ ID NO: 39944
  source 1..80: mol_type = other DNA

SEQ ID NO: 73865 - DNA, 80 bp, synthetic construct; identical to SEQ ID NO: 39945
  source 1..80: mol_type = other DNA

SEQ ID NO: 73866 - DNA, 80 bp, synthetic construct; identical to SEQ ID NO: 13862
  source 1..80: mol_type = other DNA

SEQ ID NO: 73867 - DNA, 80 bp, synthetic construct; identical to SEQ ID NO: 39947
  source 1..80: mol_type = other DNA

SEQ ID NO: 73868 - DNA, 80 bp, synthetic construct; identical to SEQ ID NO: 39948
  source 1..80: mol_type = other DNA

SEQ ID NO: 73869 - DNA, 80 bp, synthetic construct; identical to SEQ ID NO: 39949
  source 1..80: mol_type = other DNA

SEQ ID NO: 73870 - DNA, 80 bp, synthetic construct; identical to SEQ ID NO: 39950
  source 1..80: mol_type = other DNA

SEQ ID NO: 73871 - DNA, 80 bp, synthetic construct; identical to SEQ ID NO: 13863
  source 1..80: mol_type = other DNA

SEQ ID NO: 73872 - DNA, 80 bp, synthetic construct; identical to SEQ ID NO: 39952
  source 1..80: mol_type = other DNA

SEQ ID NO: 73873 - DNA, 80 bp, synthetic construct; identical to SEQ ID NO: 39953
  source 1..80: mol_type = other DNA

SEQ ID NO: 73874 - DNA, 80 bp, synthetic construct; identical to SEQ ID NO: 39954
  source 1..80: mol_type = other DNA

SEQ ID NO: 73875 - DNA, 80 bp, synthetic construct; identical to SEQ ID NO: 13864
  source 1..80: mol_type = other DNA

SEQ ID NO: 73876 - DNA, 80 bp, synthetic construct; identical to SEQ ID NO: 39956
  source 1..80: mol_type = other DNA

SEQ ID NO: 73877 - DNA, 80 bp, synthetic construct; identical to SEQ ID NO: 39957
  source 1..80: mol_type = other DNA

SEQ ID NO: 73878 - DNA, 80 bp, synthetic construct; identical to SEQ ID NO: 39958
  source 1..80: mol_type = other DNA

SEQ ID NO: 73879 - DNA, 80 bp, synthetic construct; identical to SEQ ID NO: 13865
  source 1..80: mol_type = other DNA

SEQ ID NO: 73880 - DNA, 80 bp, synthetic construct; identical to SEQ ID NO: 39960
  source 1..80: mol_type = other DNA

SEQ ID NO: 73881 - DNA, 80 bp, synthetic construct; identical to SEQ ID NO: 39961
  source 1..80: mol_type = other DNA

SEQ ID NO: 73882 - DNA, 80 bp, synthetic construct; identical to SEQ ID NO: 13866
  source 1..80: mol_type = other DNA

SEQ ID NO: 73883 - DNA, 80 bp, synthetic construct; identical to SEQ ID NO: 39963
  source 1..80: mol_type = other DNA

SEQ ID NO: 73884 - DNA, 80 bp, synthetic construct; identical to SEQ ID NO: 39964
  source 1..80: mol_type = other DNA

SEQ ID NO: 73885 - DNA, 80 bp, synthetic construct; identical to SEQ ID NO: 39965
  source 1..80: mol_type = other DNA

SEQ ID NO: 73886 - DNA, 80 bp, synthetic construct; identical to SEQ ID NO: 39966
  source 1..80: mol_type = other DNA

SEQ ID NO: 73887 - DNA, 80 bp, synthetic construct; identical to SEQ ID NO: 13867
  source 1..80: mol_type = other DNA

SEQ ID NO: 73888 - DNA, 80 bp, synthetic construct; identical to SEQ ID NO: 39968
  source 1..80: mol_type = other DNA

SEQ ID NO: 73889 - DNA, 80 bp, synthetic construct; identical to SEQ ID NO: 39969
  source 1..80: mol_type = other DNA

SEQ ID NO: 73890 - DNA, 80 bp, synthetic construct; identical to SEQ ID NO: 39970
  source 1..80: mol_type = other DNA

SEQ ID NO: 73891 - DNA, 80 bp, synthetic construct; identical to SEQ ID NO: 13868
  source 1..80: mol_type = other DNA

SEQ ID NO: 73892 - DNA, 80 bp, synthetic construct; identical to SEQ ID NO: 39972
  source 1..80: mol_type = other DNA

SEQ ID NO: 73893 - DNA, 80 bp, synthetic construct; identical to SEQ ID NO: 39973
  source 1..80: mol_type = other DNA

SEQ ID NO: 73894 - DNA, 80 bp, synthetic construct; identical to SEQ ID NO: 13869
  source 1..80: mol_type = other DNA

SEQ ID NO: 73895 - DNA, 80 bp, synthetic construct; identical to SEQ ID NO: 39975
  source 1..80: mol_type = other DNA

SEQ ID NO: 73896 - DNA, 80 bp, synthetic construct; identical to SEQ ID NO: 39976
  source 1..80: mol_type = other DNA

SEQ ID NO: 73897 - DNA, 80 bp, synthetic construct; identical to SEQ ID NO: 39977
  source 1..80: mol_type = other DNA

SEQ ID NO: 73898 - DNA, 80 bp, synthetic construct; identical to SEQ ID NO: 13870
  source 1..80: mol_type = other DNA

SEQ ID NO: 73899 - DNA, 80 bp, synthetic construct; identical to SEQ ID NO: 39979
  source 1..80: mol_type = other DNA

SEQ ID NO: 73900 - DNA, 80 bp, synthetic construct; identical to SEQ ID NO: 39980
  source 1..80: mol_type = other DNA

SEQ ID NO: 73901 - DNA, 80 bp, synthetic construct; identical to SEQ ID NO: 39981
  source 1..80: mol_type = other DNA

SEQ ID NO: 73902 - DNA, 80 bp, synthetic construct; identical to SEQ ID NO: 39982
  source 1..80: mol_type = other DNA

SEQ ID NO: 73903 - DNA, 80 bp, synthetic construct; identical to SEQ ID NO: 13871
  source 1..80: mol_type = other DNA

SEQ ID NO: 73904 - DNA, 80 bp, synthetic construct; identical to SEQ ID NO: 39984
  source 1..80: mol_type = other DNA

SEQ ID NO: 73905 - DNA, 80 bp, synthetic construct; identical to SEQ ID NO: 39985
  source 1..80: mol_type = other DNA

SEQ ID NO: 73906 - DNA, 80 bp, synthetic construct; identical to SEQ ID NO: 13872
  source 1..80: mol_type = other DNA

SEQ ID NO: 73907 - DNA, 80 bp, synthetic construct; identical to SEQ ID NO: 39987
  source 1..80: mol_type = other DNA

SEQ ID NO: 73908 - DNA, 80 bp, synthetic construct; identical to SEQ ID NO: 39988
  source 1..80: mol_type = other DNA

SEQ ID NO: 73909 - DNA, 80 bp, synthetic construct; identical to SEQ ID NO: 39989
  source 1..80: mol_type = other DNA

SEQ ID NO: 73910 - DNA, 80 bp, synthetic construct; identical to SEQ ID NO: 39990
  source 1..80: mol_type = other DNA

SEQ ID NO: 73911 - DNA, 80 bp, synthetic construct; identical to SEQ ID NO: 13873
  source 1..80: mol_type = other DNA

SEQ ID NO: 73912 - DNA, 80 bp, synthetic construct; identical to SEQ ID NO: 39992
  source 1..80: mol_type = other DNA

SEQ ID NO: 73913 - DNA, 80 bp, synthetic construct; identical to SEQ ID NO: 39993
  source 1..80: mol_type = other DNA

SEQ ID NO: 73914 - DNA, 80 bp, synthetic construct; identical to SEQ ID NO: 13874
  source 1..80: mol_type = other DNA

SEQ ID NO: 73915 - DNA, 80 bp, synthetic construct; identical to SEQ ID NO: 39996
  source 1..80: mol_type = other DNA

SEQ ID NO: 73916 - DNA, 80 bp, synthetic construct; identical to SEQ ID NO: 39997
  source 1..80: mol_type = other DNA

SEQ ID NO: 73917 - DNA, 80 bp, synthetic construct; identical to SEQ ID NO: 39998
  source 1..80: mol_type = other DNA

SEQ ID NO: 73918 - DNA, 80 bp, synthetic construct; identical to SEQ ID NO: 13875
  source 1..80: mol_type = other DNA

SEQ ID NO: 73919 - DNA, 80 bp, synthetic construct; identical to SEQ ID NO: 40000
  source 1..80: mol_type = other DNA

SEQ ID NO: 73920 - DNA, 80 bp, synthetic construct; identical to SEQ ID NO: 40001
  source 1..80: mol_type = other DNA

SEQ ID NO: 73921 - DNA, 80 bp, synthetic construct; identical to SEQ ID NO: 40002
  source 1..80: mol_type = other DNA

SEQ ID NO: 73922 - DNA, 80 bp, synthetic construct; identical to SEQ ID NO: 13876
  source 1..80: mol_type = other DNA

SEQ ID NO: 73923 - DNA, 80 bp, synthetic construct; identical to SEQ ID NO: 40004
  source 1..80: mol_type = other DNA

SEQ ID NO: 73924 - DNA, 80 bp, synthetic construct; identical to SEQ ID NO: 40005
  source 1..80: mol_type = other DNA

SEQ ID NO: 73925 - DNA, 80 bp, synthetic construct; identical to SEQ ID NO: 13877
  source 1..80: mol_type = other DNA

SEQ ID NO: 73926 - DNA, 80 bp, synthetic construct; identical to SEQ ID NO: 40007
  source 1..80: mol_type = other DNA

SEQ ID NO: 73927 - DNA, 80 bp, synthetic construct; identical to SEQ ID NO: 40008
  source 1..80: mol_type = other DNA

SEQ ID NO: 73928 - DNA, 80 bp, synthetic construct; identical to SEQ ID NO: 40009
  source 1..80: mol_type = other DNA

SEQ ID NO: 73929 - DNA, 80 bp, synthetic construct; identical to SEQ ID NO: 13878
  source 1..80: mol_type = other DNA

SEQ ID NO: 73930 - DNA, 80 bp, synthetic construct; identical to SEQ ID NO: 40011
  source 1..80: mol_type = other DNA

SEQ ID NO: 73931 - DNA, 80 bp, synthetic construct; identical to SEQ ID NO: 40012
  source 1..80: mol_type = other DNA

SEQ ID NO: 73932 - DNA, 80 bp, synthetic construct; identical to SEQ ID NO: 13879
  source 1..80: mol_type = other DNA

SEQ ID NO: 73933 - DNA, 80 bp, synthetic construct; identical to SEQ ID NO: 40015
  source 1..80: mol_type = other DNA

SEQ ID NO: 73934 - DNA, 80 bp, synthetic construct; identical to SEQ ID NO: 40016
  source 1..80: mol_type = other DNA

SEQ ID NO: 73935 - DNA, 80 bp, synthetic construct; identical to SEQ ID NO: 40017
  source 1..80: mol_type = other DNA

SEQ ID NO: 73936 - DNA, 80 bp, synthetic construct; identical to SEQ ID NO: 13880
  source 1..80: mol_type = other DNA

SEQ ID NO: 73937 - DNA, 80 bp, synthetic construct; identical to SEQ ID NO: 40019
  source 1..80: mol_type = other DNA

SEQ ID NO: 73938 - DNA, 80 bp, synthetic construct; identical to SEQ ID NO: 40020
  source 1..80: mol_type = other DNA

SEQ ID NO: 73939 - DNA, 80 bp, synthetic construct; identical to SEQ ID NO: 40021
  source 1..80: mol_type = other DNA

SEQ ID NO: 73940 - DNA, 80 bp, synthetic construct; identical to SEQ ID NO: 13881
  source 1..80: mol_type = other DNA

SEQ ID NO: 73941 - DNA, 80 bp, synthetic construct; identical to SEQ ID NO: 40023
  source 1..80: mol_type = other DNA

SEQ ID NO: 73942 - DNA, 80 bp, synthetic construct; identical to SEQ ID NO: 40024
  source 1..80: mol_type = other DNA

SEQ ID NO: 73943 - DNA, 80 bp, synthetic construct; identical to SEQ ID NO: 40025
  source 1..80: mol_type = other DNA

SEQ ID NO: 73944 - DNA, 80 bp, synthetic construct; identical to SEQ ID NO: 40026
  source 1..80: mol_type = other DNA

SEQ ID NO: 73945 - DNA, 80 bp, synthetic construct; identical to SEQ ID NO: 13882
  source 1..80: mol_type = other DNA

SEQ ID NO: 73946 - DNA, 80 bp, synthetic construct; identical to SEQ ID NO: 40028
  source 1..80: mol_type = other DNA

SEQ ID NO: 73947 - DNA, 80 bp, synthetic construct; identical to SEQ ID NO: 40029
  source 1..80: mol_type = other DNA

SEQ ID NO: 73948 - DNA, 80 bp, synthetic construct; identical to SEQ ID NO: 13883
  source 1..80: mol_type = other DNA

SEQ ID NO: 73949 - DNA, 80 bp, synthetic construct; identical to SEQ ID NO: 40031
  source 1..80: mol_type = other DNA

SEQ ID NO: 73950 - DNA, 80 bp, synthetic construct; identical to SEQ ID NO: 40032
  source 1..80: mol_type = other DNA

SEQ ID NO: 73951 - DNA, 80 bp, synthetic construct; identical to SEQ ID NO: 40033
  source 1..80: mol_type = other DNA

SEQ ID NO: 73952 - DNA, 80 bp, synthetic construct; identical to SEQ ID NO: 40034
  source 1..80: mol_type = other DNA

SEQ ID NO: 73953 - DNA, 80 bp, synthetic construct; identical to SEQ ID NO: 13884
  source 1..80: mol_type = other DNA

SEQ ID NO: 73954 - DNA, 80 bp, synthetic construct; identical to SEQ ID NO: 40036
  source 1..80: mol_type = other DNA

SEQ ID NO: 73955 - DNA, 80 bp, synthetic construct; identical to SEQ ID NO: 40037
  source 1..80: mol_type = other DNA

SEQ ID NO: 73956 - DNA, 80 bp, synthetic construct; identical to SEQ ID NO: 40038
  source 1..80: mol_type = other DNA

SEQ ID NO: 73957 - DNA, 80 bp, synthetic construct; identical to SEQ ID NO: 13885
  source 1..80: mol_type = other DNA

SEQ ID NO: 73958 - DNA, 80 bp, synthetic construct; identical to SEQ ID NO: 40040
  source 1..80: mol_type = other DNA

SEQ ID NO: 73959 - DNA, 80 bp, synthetic construct; identical to SEQ ID NO: 40041
  source 1..80: mol_type = other DNA

SEQ ID NO: 73960 - DNA, 80 bp, synthetic construct; identical to SEQ ID NO: 40042
  source 1..80: mol_type = other DNA

SEQ ID NO: 73961 - DNA, 80 bp, synthetic construct; identical to SEQ ID NO: 13886
  source 1..80: mol_type = other DNA

SEQ ID NO: 73962 - DNA, 80 bp, synthetic construct; identical to SEQ ID NO: 40044
  source 1..80: mol_type = other DNA

SEQ ID NO: 73963 - DNA, 80 bp, synthetic construct; identical to SEQ ID NO: 40045
  source 1..80: mol_type = other DNA

SEQ ID NO: 73964 - DNA, 80 bp, synthetic construct; identical to SEQ ID NO: 40046
  source 1..80: mol_type = other DNA

SEQ ID NO: 73965 - DNA, 80 bp, synthetic construct; identical to SEQ ID NO: 13887
  source 1..80: mol_type = other DNA

SEQ ID NO: 73966 - DNA, 80 bp, synthetic construct; identical to SEQ ID NO: 40048
  source 1..80: mol_type = other DNA

SEQ ID NO: 73967 - DNA, 80 bp, synthetic construct; identical to SEQ ID NO: 40049
  source 1..80: mol_type = other DNA

SEQ ID NO: 73968 - DNA, 80 bp, synthetic construct; identical to SEQ ID NO: 40050
  source 1..80: mol_type = other DNA

SEQ ID NO: 73969 - DNA, 80 bp, synthetic construct; identical to SEQ ID NO: 13888
  source 1..80: mol_type = other DNA

SEQ ID NO: 73970 - DNA, 80 bp, synthetic construct; identical to SEQ ID NO: 40052
  source 1..80: mol_type = other DNA

SEQ ID NO: 73971 - DNA, 80 bp, synthetic construct; identical to SEQ ID NO: 40053
  source 1..80: mol_type = other DNA

SEQ ID NO: 73972 - DNA, 80 bp, synthetic construct; identical to SEQ ID NO: 40054
  source 1..80: mol_type = other DNA

SEQ ID NO: 73973 - DNA, 80 bp, synthetic construct; identical to SEQ ID NO: 40055
  source 1..80: mol_type = other DNA

SEQ ID NO: 73974 - DNA, 80 bp, synthetic construct; identical to SEQ ID NO: 13889
  source 1..80: mol_type = other DNA

SEQ ID NO: 73975 - DNA, 80 bp, synthetic construct; identical to SEQ ID NO: 40057
  source 1..80: mol_type = other DNA

SEQ ID NO: 73976 - DNA, 80 bp, synthetic construct; identical to SEQ ID NO: 40058
  source 1..80: mol_type = other DNA

SEQ ID NO: 73977 - DNA, 80 bp, synthetic construct; identical to SEQ ID NO: 40059
  source 1..80: mol_type = other DNA

SEQ ID NO: 73978 - DNA, 80 bp, synthetic construct; identical to SEQ ID NO: 13890
  source 1..80: mol_type = other DNA

SEQ ID NO: 73979 - DNA, 80 bp, synthetic construct; identical to SEQ ID NO: 40061
  source 1..80: mol_type = other DNA

SEQ ID NO: 73980 - DNA, 80 bp, synthetic construct; identical to SEQ ID NO: 40062
  source 1..80: mol_type = other DNA

SEQ ID NO: 73981 - DNA, 80 bp, synthetic construct; identical to SEQ ID NO: 13891
  source 1..80: mol_type = other DNA

SEQ ID NO: 73982 - DNA, 80 bp, synthetic construct; identical to SEQ ID NO: 40064
  source 1..80: mol_type = other DNA

SEQ ID NO: 73983 - DNA, 80 bp, synthetic construct; identical to SEQ ID NO: 40065
  source 1..80: mol_type = other DNA

SEQ ID NO: 73984 - DNA, 80 bp, synthetic construct; identical to SEQ ID NO: 40066
  source 1..80: mol_type = other DNA

SEQ ID NO: 73985 - DNA, 80 bp, synthetic construct; identical to SEQ ID NO: 13892
  source 1..80: mol_type = other DNA

SEQ ID NO: 73986 - DNA, 80 bp, synthetic construct; identical to SEQ ID NO: 40068
  source 1..80: mol_type = other DNA

SEQ ID NO: 73987 - DNA, 80 bp, synthetic construct; identical to SEQ ID NO: 40069
  source 1..80: mol_type = other DNA

SEQ ID NO: 73988 - DNA, 80 bp, synthetic construct; identical to SEQ ID NO: 40070
  source 1..80: mol_type = other DNA

SEQ ID NO: 73989 - DNA, 80 bp, synthetic construct; identical to SEQ ID NO: 13893
  source 1..80: mol_type = other DNA

SEQ ID NO: 73990 - DNA, 80 bp, synthetic construct; identical to SEQ ID NO: 40072
  source 1..80: mol_type = other DNA

SEQ ID NO: 73991 - DNA, 80 bp, synthetic construct; identical to SEQ ID NO: 40073
  source 1..80: mol_type = other DNA

SEQ ID NO: 73992 - DNA, 80 bp, synthetic construct; identical to SEQ ID NO: 40074
  source 1..80: mol_type = other DNA

SEQ ID NO: 73993 - DNA, 80 bp, synthetic construct; identical to SEQ ID NO: 40075
  source 1..80: mol_type = other DNA

SEQ ID NO: 73994 - DNA, 80 bp, synthetic construct; identical to SEQ ID NO: 13894
  source 1..80: mol_type = other DNA

SEQ ID NO: 73995 - DNA, 80 bp, synthetic construct; identical to SEQ ID NO: 40077
  source 1..80: mol_type = other DNA

SEQ ID NO: 73996 - DNA, 80 bp, synthetic construct; identical to SEQ ID NO: 40078
  source 1..80: mol_type = other DNA

SEQ ID NO: 73997 - DNA, 80 bp, synthetic construct; identical to SEQ ID NO: 40079
  source 1..80: mol_type = other DNA

SEQ ID NO: 73998 - DNA, 80 bp, synthetic construct; identical to SEQ ID NO: 13895
  source 1..80: mol_type = other DNA

SEQ ID NO: 73999 - DNA, 80 bp, synthetic construct; identical to SEQ ID NO: 40081
  source 1..80: mol_type = other DNA

SEQ ID NO: 74000 - DNA, 80 bp, synthetic construct; identical to SEQ ID NO: 40082
  source 1..80: mol_type = other DNA

SEQ ID NO: 74001 - DNA, 80 bp, synthetic construct; identical to SEQ ID NO: 13896
  source 1..80: mol_type = other DNA

SEQ ID NO: 74002 - DNA, 80 bp, synthetic construct; identical to SEQ ID NO: 40084
  source 1..80: mol_type = other DNA

SEQ ID NO: 74003 - DNA, 80 bp, synthetic construct; identical to SEQ ID NO: 40085
  source 1..80: mol_type = other DNA

SEQ ID NO: 74004 - DNA, 80 bp, synthetic construct; identical to SEQ ID NO: 40086
  source 1..80: mol_type = other DNA

SEQ ID NO: 74005 - DNA, 80 bp, synthetic construct; identical to SEQ ID NO: 13897
  source 1..80: mol_type = other DNA

SEQ ID NO: 74006 - DNA, 80 bp, synthetic construct; identical to SEQ ID NO: 40088
  source 1..80: mol_type = other DNA

SEQ ID NO: 74007 - DNA, 80 bp, synthetic construct; identical to SEQ ID NO: 40089
  source 1..80: mol_type = other DNA

SEQ ID NO: 74008 - DNA, 80 bp, synthetic construct; identical to SEQ ID NO: 40090
  source 1..80: mol_type = other DNA

SEQ ID NO: 74009 - DNA, 80 bp, synthetic construct; identical to SEQ ID NO: 13898
  source 1..80: mol_type = other DNA

SEQ ID NO: 74010 - DNA, 80 bp, synthetic construct; identical to SEQ ID NO: 40092
  source 1..80: mol_type = other DNA

SEQ ID NO: 74011 - DNA, 80 bp, synthetic construct; identical to SEQ ID NO: 40093
  source 1..80: mol_type = other DNA

SEQ ID NO: 74012 - DNA, 80 bp, synthetic construct; identical to SEQ ID NO: 40094
  source 1..80: mol_type = other DNA

SEQ ID NO: 74013 - DNA, 80 bp, synthetic construct; identical to SEQ ID NO: 13899
  source 1..80: mol_type = other DNA

SEQ ID NO: 74014 - DNA, 80 bp, synthetic construct; identical to SEQ ID NO: 40096
  source 1..80: mol_type = other DNA

SEQ ID NO: 74015 - DNA, 80 bp, synthetic construct; identical to SEQ ID NO: 40097
  source 1..80: mol_type = other DNA

SEQ ID NO: 74016 - DNA, 80 bp, synthetic construct; identical to SEQ ID NO: 40098
  source 1..80: mol_type = other DNA

SEQ ID NO: 74017 - DNA, 80 bp, synthetic construct; identical to SEQ ID NO: 13900
  source 1..80: mol_type = other DNA

SEQ ID NO: 74018 - DNA, 80 bp, synthetic construct; identical to SEQ ID NO: 40100
  source 1..80: mol_type = other DNA

SEQ ID NO: 74019 - DNA, 80 bp, synthetic construct; identical to SEQ ID NO: 40101
  source 1..80: mol_type = other DNA

SEQ ID NO: 74020 - DNA, 80 bp, synthetic construct; identical to SEQ ID NO: 40102
  source 1..80: mol_type = other DNA

SEQ ID NO: 74021 - DNA, 80 bp, synthetic construct; identical to SEQ ID NO: 13901
  source 1..80: mol_type = other DNA

SEQ ID NO: 74022 - DNA, 80 bp, synthetic construct; identical to SEQ ID NO: 40104
  source 1..80: mol_type = other DNA

SEQ ID NO: 74023 - DNA, 80 bp, synthetic construct; identical to SEQ ID NO: 40105
  source 1..80: mol_type = other DNA

SEQ ID NO: 74024 - DNA, 80 bp, synthetic construct; identical to SEQ ID NO: 40106
  source 1..80: mol_type = other DNA

SEQ ID NO: 74025 - DNA, 80 bp, synthetic construct; identical to SEQ ID NO: 13902
  source 1..80: mol_type = other DNA

SEQ ID NO: 74026 - DNA, 80 bp, synthetic construct; identical to SEQ ID NO: 40108
  source 1..80: mol_type = other DNA

SEQ ID NO: 74027 - DNA, 80 bp, synthetic construct; identical to SEQ ID NO: 40110
  source 1..80: mol_type = other DNA

SEQ ID NO: 74028 - DNA, 80 bp, synthetic construct; identical to SEQ ID NO: 40111
  source 1..80: mol_type = other DNA

SEQ ID NO: 74029 - DNA, 80 bp, synthetic construct; identical to SEQ ID NO: 13903
  source 1..80: mol_type = other DNA

SEQ ID NO: 74030 - DNA, 80 bp, synthetic construct; identical to SEQ ID NO: 40113
  source 1..80: mol_type = other DNA

SEQ ID NO: 74031 - DNA, 80 bp, synthetic construct; identical to SEQ ID NO: 40114
  source 1..80: mol_type = other DNA

SEQ ID NO: 74032 - DNA, 80 bp, synthetic construct; identical to SEQ ID NO: 40115
  source 1..80: mol_type = other DNA

SEQ ID NO: 74033 - DNA, 80 bp, synthetic construct; identical to SEQ ID NO: 13904
  source 1..80: mol_type = other DNA

SEQ ID NO: 74034 - DNA, 80 bp, synthetic construct; identical to SEQ ID NO: 40117
  source 1..80: mol_type = other DNA

SEQ ID NO: 74035 - DNA, 80 bp, synthetic construct; identical to SEQ ID NO: 40118
  source 1..80: mol_type = other DNA

SEQ ID NO: 74036 - DNA, 80 bp, synthetic construct; identical to SEQ ID NO: 40119
  source 1..80: mol_type = other DNA

SEQ ID NO: 74037 - DNA, 80 bp, synthetic construct; identical to SEQ ID NO: 40120
  source 1..80: mol_type = other DNA

SEQ ID NO: 74038 - DNA, 80 bp, synthetic construct; identical to SEQ ID NO: 13905
  source 1..80: mol_type = other DNA

SEQ ID NO: 74039 - DNA, 80 bp, synthetic construct; identical to SEQ ID NO: 40122
  source 1..80: mol_type = other DNA

SEQ ID NO: 74040 - DNA, 80 bp, synthetic construct; identical to SEQ ID NO: 40123
  source 1..80: mol_type = other DNA

SEQ ID NO: 74041 - DNA, 80 bp, synthetic construct; identical to SEQ ID NO: 13906
  source 1..80: mol_type = other DNA

SEQ ID NO: 74042 - DNA, 80 bp, synthetic construct; identical to SEQ ID NO: 40125
  source 1..80: mol_type = other DNA

SEQ ID NO: 74043 - DNA, 80 bp, synthetic construct; identical to SEQ ID NO: 40126
  source 1..80: mol_type = other DNA

SEQ ID NO: 74044 - DNA, 80 bp, synthetic construct; identical to SEQ ID NO: 40127
  source 1..80: mol_type = other DNA

SEQ ID NO: 74045 - DNA, 80 bp, synthetic construct; identical to SEQ ID NO: 40128
  source 1..80: mol_type = other DNA

SEQ ID NO: 74046 - DNA, 80 bp, synthetic construct; identical to SEQ ID NO: 13907
  source 1..80: mol_type = other DNA

SEQ ID NO: 74047 - DNA, 80 bp, synthetic construct; identical to SEQ ID NO: 40130
  source 1..80: mol_type = other DNA

SEQ ID NO: 74048 - DNA, 80 bp, synthetic construct; identical to SEQ ID NO: 40131
  source 1..80: mol_type = other DNA

SEQ ID NO: 74049 - DNA, 80 bp, synthetic construct; identical to SEQ ID NO: 13908
  source 1..80: mol_type = other DNA

SEQ ID NO: 74050 - DNA, 80 bp, synthetic construct; identical to SEQ ID NO: 40133
  source 1..80: mol_type = other DNA

SEQ ID NO: 74051 - DNA, 80 bp, synthetic construct; identical to SEQ ID NO: 40134
  source 1..80: mol_type = other DNA

SEQ ID NO: 74052 - DNA, 80 bp, synthetic construct; identical to SEQ ID NO: 40136
  source 1..80: mol_type = other DNA

SEQ ID NO: 74053 - DNA, 80 bp, synthetic construct; identical to SEQ ID NO: 13909
  source 1..80: mol_type = other DNA

SEQ ID NO: 74054 - DNA, 80 bp, synthetic construct; identical to SEQ ID NO: 40138
  source 1..80: mol_type = other DNA

SEQ ID NO: 74055 - DNA, 80 bp, synthetic construct; identical to SEQ ID NO: 40139
  source 1..80: mol_type = other DNA

SEQ ID NO: 74056 - DNA, 80 bp, synthetic construct; identical to SEQ ID NO: 40140
  source 1..80: mol_type = other DNA

SEQ ID NO: 74057 - DNA, 80 bp, synthetic construct; identical to SEQ ID NO: 13910
  source 1..80: mol_type = other DNA

SEQ ID NO: 74058 - DNA, 80 bp, synthetic construct; identical to SEQ ID NO: 40142
  source 1..80: mol_type = other DNA

SEQ ID NO: 74059 - DNA, 80 bp, synthetic construct; identical to SEQ ID NO: 40143
  source 1..80: mol_type = other DNA

SEQ ID NO: 74060 - DNA, 80 bp, synthetic construct; identical to SEQ ID NO: 40144
  source 1..80: mol_type = other DNA

SEQ ID NO: 74061 - DNA, 80 bp, synthetic construct; identical to SEQ ID NO: 40145
  source 1..80: mol_type = other DNA

SEQ ID NO: 74062 - DNA, 80 bp, synthetic construct; identical to SEQ ID NO: 13911
  source 1..80: mol_type = other DNA

SEQ ID NO: 74063 - DNA, 80 bp, synthetic construct; identical to SEQ ID NO: 40147
  source 1..80: mol_type = other DNA

SEQ ID NO: 74064 - DNA, 80 bp, synthetic construct; identical to SEQ ID NO: 40148
  source 1..80: mol_type = other DNA

SEQ ID NO: 74065 - DNA, 80 bp, synthetic construct; identical to SEQ ID NO: 40149
  source 1..80: mol_type = other DNA

SEQ ID NO: 74066 - DNA, 80 bp, synthetic construct; identical to SEQ ID NO: 40150
  source 1..80: mol_type = other DNA

SEQ ID NO: 74067 - DNA, 80 bp, synthetic construct; identical to SEQ ID NO: 13912
  source 1..80: mol_type = other DNA

SEQ ID NO: 74068 - DNA, 80 bp, synthetic construct; identical to SEQ ID NO: 40152
  source 1..80: mol_type = other DNA

SEQ ID NO: 74069 - DNA, 80 bp, synthetic construct; identical to SEQ ID NO: 40153
  source 1..80: mol_type = other DNA

SEQ ID NO: 74070 - DNA, 80 bp, synthetic construct; identical to SEQ ID NO: 13913
  source 1..80: mol_type = other DNA

SEQ ID NO: 74071 - DNA, 80 bp, synthetic construct; identical to SEQ ID NO: 40155
  source 1..80: mol_type = other DNA

SEQ ID NO: 74072 - DNA, 80 bp, synthetic construct; identical to SEQ ID NO: 40156
  source 1..80: mol_type = other DNA

SEQ ID NO: 74073 - DNA, 80 bp, synthetic construct; identical to SEQ ID NO: 40157
  source 1..80: mol_type = other DNA

SEQ ID NO: 74074 - DNA, 80 bp, synthetic construct; identical to SEQ ID NO: 40158
  source 1..80: mol_type = other DNA

SEQ ID NO: 74075 - DNA, 80 bp, synthetic construct; identical to SEQ ID NO: 13914
  source 1..80: mol_type = other DNA

SEQ ID NO: 74076 - DNA, 80 bp, synthetic construct; identical to SEQ ID NO: 40160
  source 1..80: mol_type = other DNA

SEQ ID NO: 74077 - DNA, 80 bp, synthetic construct; identical to SEQ ID NO: 40161
  source 1..80: mol_type = other DNA

SEQ ID NO: 74078 - DNA, 80 bp, synthetic construct; identical to SEQ ID NO: 40162
  source 1..80: mol_type = other DNA

SEQ ID NO: 74079 - DNA, 80 bp, synthetic construct; identical to SEQ ID NO: 40163
  source 1..80: mol_type = other DNA

SEQ ID NO: 74080 - DNA, 80 bp, synthetic construct; identical to SEQ ID NO: 13915
  source 1..80: mol_type = other DNA

SEQ ID NO: 74081 - DNA, 80 bp, synthetic construct; identical to SEQ ID NO: 40166
  source 1..80: mol_type = other DNA

SEQ ID NO: 74082 - DNA, 80 bp, synthetic construct; identical to SEQ ID NO: 40167
  source 1..80: mol_type = other DNA

SEQ ID NO: 74083 - DNA, 80 bp, synthetic construct; identical to SEQ ID NO: 13916
  source 1..80: mol_type = other DNA

SEQ ID NO: 74084 - DNA, 80 bp, synthetic construct; identical to SEQ ID NO: 40169
  source 1..80: mol_type = other DNA

SEQ ID NO: 74085 - DNA, 80 bp, synthetic construct; identical to SEQ ID NO: 40170
  source 1..80: mol_type = other DNA

SEQ ID NO: 74086 - DNA, 80 bp, synthetic construct; identical to SEQ ID NO: 40171
  source 1..80: mol_type = other DNA

SEQ ID NO: 74087 - DNA, 80 bp, synthetic construct; identical to SEQ ID NO: 40172
  source 1..80: mol_type = other DNA

SEQ ID NO: 74088 - DNA, 80 bp, synthetic construct; identical to SEQ ID NO: 13917
  source 1..80: mol_type = other DNA

SEQ ID NO: 74089 - DNA, 80 bp, synthetic construct; identical to SEQ ID NO: 40174
  source 1..80: mol_type = other DNA

SEQ ID NO: 74090 - DNA, 80 bp, synthetic construct; identical to SEQ ID NO: 40175
  source 1..80: mol_type = other DNA

SEQ ID NO: 74091 - DNA, 80 bp, synthetic construct; identical to SEQ ID NO: 13918
  source 1..80: mol_type = other DNA

SEQ ID NO: 74092 - DNA, 80 bp, synthetic construct; identical to SEQ ID NO: 40178
  source 1..80: mol_type = other DNA

SEQ ID NO: 74093 - DNA, 80 bp, synthetic construct; identical to SEQ ID NO: 40179
  source 1..80: mol_type = other DNA

SEQ ID NO: 74094 - DNA, 80 bp, synthetic construct; identical to SEQ ID NO: 13919
  source 1..80: mol_type = other DNA

SEQ ID NO: 74095 - DNA, 80 bp, synthetic construct; identical to SEQ ID NO: 40181
  source 1..80: mol_type = other DNA

SEQ ID NO: 74096 - DNA, 80 bp, synthetic construct; identical to SEQ ID NO: 40182
  source 1..80: mol_type = other DNA

SEQ ID NO: 74097 - DNA, 80 bp, synthetic construct; identical to SEQ ID NO: 40184
  source 1..80: mol_type = other DNA

SEQ ID NO: 74098 - DNA, 80 bp, synthetic construct; identical to SEQ ID NO: 13920
  source 1..80: mol_type = other DNA

SEQ ID NO: 74099 - DNA, 80 bp, synthetic construct; identical to SEQ ID NO: 40187
  source 1..80: mol_type = other DNA

SEQ ID NO: 74100 - DNA, 80 bp, synthetic construct; identical to SEQ ID NO: 13921
  source 1..80: mol_type = other DNA

SEQ ID NO: 74101 - DNA, 80 bp, synthetic construct; identical to SEQ ID NO: 40189
  source 1..80: mol_type = other DNA

SEQ ID NO: 74102 - DNA, 80 bp, synthetic construct; identical to SEQ ID NO: 40190
  source 1..80: mol_type = other DNA

SEQ ID NO: 74103 - DNA, 80 bp, synthetic construct; identical to SEQ ID NO: 40191
  source 1..80: mol_type = other DNA

SEQ ID NO: 74104 - DNA, 80 bp, synthetic construct; identical to SEQ ID NO: 13922
  source 1..80: mol_type = other DNA

SEQ ID NO: 74105 - DNA, 80 bp, synthetic construct; identical to SEQ ID NO: 40193
  source 1..80: mol_type = other DNA

SEQ ID NO: 74106 - DNA, 80 bp, synthetic construct; identical to SEQ ID NO: 40194
  source 1..80: mol_type = other DNA

SEQ ID NO: 74107 - DNA, 80 bp, synthetic construct; identical to SEQ ID NO: 40195
  source 1..80: mol_type = other DNA

SEQ ID NO: 74108 - DNA, 80 bp, synthetic construct; identical to SEQ ID NO: 40196
  source 1..80: mol_type = other DNA

SEQ ID NO: 74109 - DNA, 80 bp, synthetic construct; identical to SEQ ID NO: 13923
  source 1..80: mol_type = other DNA

SEQ ID NO: 74110 - DNA, 80 bp, synthetic construct; identical to SEQ ID NO: 40198
  source 1..80: mol_type = other DNA

SEQ ID NO: 74111 - DNA, 80 bp, synthetic construct; identical to SEQ ID NO: 40199
  source 1..80: mol_type = other DNA

SEQ ID NO: 74112 - DNA, 80 bp, synthetic construct; identical to SEQ ID NO: 40200
  source 1..80: mol_type = other DNA

SEQ ID NO: 74113 - DNA, 80 bp, synthetic construct; identical to SEQ ID NO: 13924
  source 1..80: mol_type = other DNA

SEQ ID NO: 74114 - DNA, 80 bp, synthetic construct; identical to SEQ ID NO: 40202
  source 1..80: mol_type = other DNA

SEQ ID NO: 74115 - DNA, 80 bp, synthetic construct; identical to SEQ ID NO: 40203
  source 1..80: mol_type = other DNA

SEQ ID NO: 74116 - DNA, 80 bp, synthetic construct; identical to SEQ ID NO: 13925
  source 1..80: mol_type = other DNA

SEQ ID NO: 74117 - DNA, 80 bp, synthetic construct; identical to SEQ ID NO: 40205
  source 1..80: mol_type = other DNA

SEQ ID NO: 74118 - DNA, 80 bp, synthetic construct; identical to SEQ ID NO: 40206
  source 1..80: mol_type = other DNA

SEQ ID NO: 74119 - DNA, 80 bp, synthetic construct; identical to SEQ ID NO: 40207
  source 1..80: mol_type = other DNA

SEQ ID NO: 74120 - DNA, 80 bp, synthetic construct; identical to SEQ ID NO: 40208
  source 1..80: mol_type = other DNA

SEQ ID NO: 74121 - DNA, 80 bp, synthetic construct; identical to SEQ ID NO: 13926
  source 1..80: mol_type = other DNA

SEQ ID NO: 74122 - DNA, 80 bp, synthetic construct; identical to SEQ ID NO: 40210
  source 1..80: mol_type = other DNA

SEQ ID NO: 74123 - DNA, 80 bp, synthetic construct; identical to SEQ ID NO: 40211
  source 1..80: mol_type = other DNA

SEQ ID NO: 74124 - DNA, 80 bp, synthetic construct; identical to SEQ ID NO: 13927
  source 1..80: mol_type = other DNA

SEQ ID NO: 74125 - DNA, 80 bp, synthetic construct; identical to SEQ ID NO: 40214
  source 1..80: mol_type = other DNA

SEQ ID NO: 74126 - DNA, 80 bp, synthetic construct; identical to SEQ ID NO: 40215
  source 1..80: mol_type = other DNA

SEQ ID NO: 74127 - DNA, 80 bp, synthetic construct; identical to SEQ ID NO: 13928
  source 1..80: mol_type = other DNA

SEQ ID NO: 74128 - DNA, 80 bp, synthetic construct; identical to SEQ ID NO: 40217
  source 1..80: mol_type = other DNA

SEQ ID NO: 74129 - DNA, 80 bp, synthetic construct; identical to SEQ ID NO: 40219
  source 1..80: mol_type = other DNA

SEQ ID NO: 74130 - DNA, 80 bp, synthetic construct; identical to SEQ ID NO: 13929
  source 1..80: mol_type = other DNA

SEQ ID NO: 74131 - DNA, 80 bp, synthetic construct; identical to SEQ ID NO: 40221
  source 1..80: mol_type = other DNA

SEQ ID NO: 74132 - DNA, 80 bp, synthetic construct; identical to SEQ ID NO: 40222
  source 1..80: mol_type = other DNA

SEQ ID NO: 74133 - DNA, 80 bp, synthetic construct; identical to SEQ ID NO: 40223
  source 1..80: mol_type = other DNA

SEQ ID NO: 74134 - DNA, 80 bp, synthetic construct; identical to SEQ ID NO: 13930
  source 1..80: mol_type = other DNA

SEQ ID NO: 74135 - DNA, 80 bp, synthetic construct; identical to SEQ ID NO: 40226
  source 1..80: mol_type = other DNA

SEQ ID NO: 74136 - DNA, 80 bp, synthetic construct; identical to SEQ ID NO: 40227
  source 1..80: mol_type = other DNA

SEQ ID NO: 74137 - DNA, 80 bp, synthetic construct; identical to SEQ ID NO: 13931
  source 1..80: mol_type = other DNA

SEQ ID NO: 74138 - DNA, 80 bp, synthetic construct; identical to SEQ ID NO: 40229
  source 1..80: mol_type = other DNA

SEQ ID NO: 74139 - DNA, 80 bp, synthetic construct; identical to SEQ ID NO: 40230
  source 1..80: mol_type = other DNA

SEQ ID NO: 74140 - DNA, 80 bp, synthetic construct; identical to SEQ ID NO: 40231
  source 1..80: mol_type = other DNA

SEQ ID NO: 74141 - DNA, 80 bp, synthetic construct; identical to SEQ ID NO: 13932
  source 1..80: mol_type = other DNA

SEQ ID NO: 74142 - DNA, 80 bp, synthetic construct; identical to SEQ ID NO: 40233
  source 1..80: mol_type = other DNA

SEQ ID NO: 74143 - DNA, 80 bp, synthetic construct; identical to SEQ ID NO: 40234
  source 1..80: mol_type = other DNA

SEQ ID NO: 74144 - DNA, 80 bp, synthetic construct; identical to SEQ ID NO: 40235
  source 1..80: mol_type = other DNA

SEQ ID NO: 74145 - DNA, 80 bp, synthetic construct; identical to SEQ ID NO: 13933
  source 1..80: mol_type = other DNA

SEQ ID NO: 74146 - DNA, 80 bp, synthetic construct; identical to SEQ ID NO: 40237
  source 1..80: mol_type = other DNA

SEQ ID NO: 74147 - DNA, 80 bp, synthetic construct; identical to SEQ ID NO: 40238
  source 1..80: mol_type = other DNA

SEQ ID NO: 74148 - DNA, 80 bp, synthetic construct; identical to SEQ ID NO: 40239
  source 1..80: mol_type = other DNA

SEQ ID NO: 74149 - DNA, 80 bp, synthetic construct; identical to SEQ ID NO: 40240
  source 1..80: mol_type = other DNA

SEQ ID NO: 74150 - DNA, 80 bp, synthetic construct; identical to SEQ ID NO: 13934
  source 1..80: mol_type = other DNA

SEQ ID NO: 74151 - DNA, 80 bp, synthetic construct; identical to SEQ ID NO: 40242
  source 1..80: mol_type = other DNA

SEQ ID NO: 74152 - DNA, 80 bp, synthetic construct; identical to SEQ ID NO: 40243
  source 1..80: mol_type = other DNA

SEQ ID NO: 74153 - DNA, 80 bp, synthetic construct; identical to SEQ ID NO: 40244
  source 1..80: mol_type = other DNA

SEQ ID NO: 74154 - DNA, 80 bp, synthetic construct; identical to SEQ ID NO: 13935
  source 1..80: mol_type = other DNA

SEQ ID NO: 74155 - DNA, 80 bp, synthetic construct; identical to SEQ ID NO: 40246
  source 1..80: mol_type = other DNA

SEQ ID NO: 74156 - DNA, 80 bp, synthetic construct; identical to SEQ ID NO: 13936
  source 1..80: mol_type = other DNA

SEQ ID NO: 74157 - DNA, 80 bp, synthetic construct; identical to SEQ ID NO: 40248
  source 1..80: mol_type = other DNA

SEQ ID NO: 74158 - DNA, 80 bp, synthetic construct; identical to SEQ ID NO: 40249
  source 1..80: mol_type = other DNA

SEQ ID NO: 74159 - DNA, 80 bp, synthetic construct; identical to SEQ ID NO: 40250
  source 1..80: mol_type = other DNA

SEQ ID NO: 74160 - DNA, 80 bp, synthetic construct; identical to SEQ ID NO: 13937
  source 1..80: mol_type = other DNA

SEQ ID NO: 74161 - DNA, 80 bp, synthetic construct; identical to SEQ ID NO: 40252
  source 1..80: mol_type = other DNA

SEQ ID NO: 74162 - DNA, 80 bp, synthetic construct; identical to SEQ ID NO: 40253
  source 1..80: mol_type = other DNA

SEQ ID NO: 74163 - DNA, 80 bp, synthetic construct; identical to SEQ ID NO: 40254
  source 1..80: mol_type = other DNA

SEQ ID NO: 74164 - DNA, 80 bp, synthetic construct; identical to SEQ ID NO: 40255
  source 1..80: mol_type = other DNA

SEQ ID NO: 74165 - DNA, 80 bp, synthetic construct; identical to SEQ ID NO: 13938
  source 1..80: mol_type = other DNA

SEQ ID NO: 74166 - DNA, 80 bp, synthetic construct; identical to SEQ ID NO: 40257
  source 1..80: mol_type = other DNA

SEQ ID NO: 74167 - DNA, 80 bp, synthetic construct; identical to SEQ ID NO: 40258
  source 1..80: mol_type = other DNA

SEQ ID NO: 74168 - DNA, 80 bp, synthetic construct; identical to SEQ ID NO: 13939
  source 1..80: mol_type = other DNA

SEQ ID NO: 74169 - DNA, 80 bp, synthetic construct; identical to SEQ ID NO: 40260
  source 1..80: mol_type = other DNA

SEQ ID NO: 74170 - DNA, 80 bp, synthetic construct; identical to SEQ ID NO: 40261
  source 1..80: mol_type = other DNA

SEQ ID NO: 74171 - DNA, 80 bp, synthetic construct; identical to SEQ ID NO: 40262
  source 1..80: mol_type = other DNA

SEQ ID NO: 74172 - DNA, 80 bp, synthetic construct; identical to SEQ ID NO: 40263
  source 1..80: mol_type = other DNA

SEQ ID NO: 74173 - DNA, 80 bp, synthetic construct; identical to SEQ ID NO: 13940
  source 1..80: mol_type = other DNA

SEQ ID NO: 74174 - DNA, 80 bp, synthetic construct; identical to SEQ ID NO: 40265
  source 1..80: mol_type = other DNA

SEQ ID NO: 74175 - DNA, 80 bp, synthetic construct; identical to SEQ ID NO: 40266
  source 1..80: mol_type = other DNA

SEQ ID NO: 74176 - DNA, 80 bp, synthetic construct; identical to SEQ ID NO: 40267
  source 1..80: mol_type = other DNA

SEQ ID NO: 74177 - DNA, 80 bp, synthetic construct; identical to SEQ ID NO: 13941
  source 1..80: mol_type = other DNA

SEQ ID NO: 74178 - DNA, 80 bp, synthetic construct; identical to SEQ ID NO: 40269
  source 1..80: mol_type = other DNA

SEQ ID NO: 74179 - DNA, 80 bp, synthetic construct; identical to SEQ ID NO: 40270
  source 1..80: mol_type = other DNA

SEQ ID NO: 74180 - DNA, 80 bp, synthetic construct; identical to SEQ ID NO: 40272
  source 1..80: mol_type = other DNA

SEQ ID NO: 74181 - DNA, 80 bp, synthetic construct; identical to SEQ ID NO: 13942
  source 1..80: mol_type = other DNA

SEQ ID NO: 74182 - DNA, 80 bp, synthetic construct; identical to SEQ ID NO: 40274
  source 1..80: mol_type = other DNA

SEQ ID NO: 74183 - DNA, 80 bp, synthetic construct; identical to SEQ ID NO: 40275
  source 1..80: mol_type = other DNA

SEQ ID NO: 74184 - DNA, 80 bp, synthetic construct; identical to SEQ ID NO: 40276
  source 1..80: mol_type = other DNA

SEQ ID NO: 74185 - DNA, 80 bp, synthetic construct; identical to SEQ ID NO: 13943
  source 1..80: mol_type = other DNA

SEQ ID NO: 74186 - DNA, 80 bp, synthetic construct; identical to SEQ ID NO: 40278
  source 1..80: mol_type = other DNA

SEQ ID NO: 74187 - DNA, 80 bp, synthetic construct; identical to SEQ ID NO: 40279
  source 1..80: mol_type = other DNA

SEQ ID NO: 74188 - DNA, 80 bp, synthetic construct; identical to SEQ ID NO: 40280
  source 1..80: mol_type = other DNA

SEQ ID NO: 74189 - DNA, 80 bp, synthetic construct; identical to SEQ ID NO: 13944
  source 1..80: mol_type = other DNA

SEQ ID NO: 74190 - DNA, 80 bp, synthetic construct; identical to SEQ ID NO: 40282
  source 1..80: mol_type = other DNA

SEQ ID NO: 74191 - DNA, 80 bp, synthetic construct; identical to SEQ ID NO: 40283
  source 1..80: mol_type = other DNA

SEQ ID NO: 74192 - DNA, 80 bp, synthetic construct; identical to SEQ ID NO: 13945
  source 1..80: mol_type = other DNA

SEQ ID NO: 74193 - DNA, 80 bp, synthetic construct; identical to SEQ ID NO: 40285
  source 1..80: mol_type = other DNA

SEQ ID NO: 74194 - DNA, 80 bp, synthetic construct; identical to SEQ ID NO: 40286
  source 1..80: mol_type = other DNA

SEQ ID NO: 74195 - DNA, 80 bp, synthetic construct; identical to SEQ ID NO: 40287
  source 1..80: mol_type = other DNA

SEQ ID NO: 74196 - DNA, 80 bp, synthetic construct; identical to SEQ ID NO: 40288
  source 1..80: mol_type = other DNA

SEQ ID NO: 74197 - DNA, 80 bp, synthetic construct; identical to SEQ ID NO: 13946
  source 1..80: mol_type = other DNA

SEQ ID NO: 74198 - DNA, 80 bp, synthetic construct; identical to SEQ ID NO: 40290
  source 1..80: mol_type = other DNA

SEQ ID NO: 74199 - DNA, 80 bp, synthetic construct; identical to SEQ ID NO: 40291
  source 1..80: mol_type = other DNA

SEQ ID NO: 74200 - DNA, 80 bp, synthetic construct; identical to SEQ ID NO: 40292
  source 1..80: mol_type = other DNA

SEQ ID NO: 74201 - DNA, 80 bp, synthetic construct; identical to SEQ ID NO: 13947
  source 1..80: mol_type = other DNA

SEQ ID NO: 74202 - DNA, 80 bp, synthetic construct; identical to SEQ ID NO: 40294
  source 1..80: mol_type = other DNA

SEQ ID NO: 74203 - DNA, 80 bp, synthetic construct; identical to SEQ ID NO: 40295
  source 1..80: mol_type = other DNA

SEQ ID NO: 74204 - DNA, 80 bp, synthetic construct; identical to SEQ ID NO: 40296
  source 1..80: mol_type = other DNA

SEQ ID NO: 74205 - DNA, 80 bp, synthetic construct; identical to SEQ ID NO: 13948
  source 1..80: mol_type = other DNA

SEQ ID NO: 74206 - DNA, 80 bp, synthetic construct; identical to SEQ ID NO: 40298
  source 1..80: mol_type = other DNA

SEQ ID NO: 74207 - DNA, 80 bp, synthetic construct; identical to SEQ ID NO: 40299
  source 1..80: mol_type = other DNA

SEQ ID NO: 74208 - DNA, 80 bp, synthetic construct; identical to SEQ ID NO: 40300
  source 1..80: mol_type = other DNA

SEQ ID NO: 74209 - DNA, 80 bp, synthetic construct; identical to SEQ ID NO: 13949
  source 1..80: mol_type = other DNA

SEQ ID NO: 74210 - DNA, 80 bp, synthetic construct; identical to SEQ ID NO: 40302
  source 1..80: mol_type = other DNA

SEQ ID NO: 74211 - DNA, 80 bp, synthetic construct; identical to SEQ ID NO: 40303
  source 1..80: mol_type = other DNA

SEQ ID NO: 74212 - DNA, 80 bp, synthetic construct; identical to SEQ ID NO: 13950
  source 1..80: mol_type = other DNA

SEQ ID NO: 74213 - DNA, 80 bp, synthetic construct; identical to SEQ ID NO: 40305
  source 1..80: mol_type = other DNA

SEQ ID NO: 74214 - DNA, 80 bp, synthetic construct; identical to SEQ ID NO: 40306
  source 1..80: mol_type = other DNA

SEQ ID NO: 74215 - DNA, 80 bp, synthetic construct; identical to SEQ ID NO: 40307
  source 1..80: mol_type = other DNA

SEQ ID NO: 74216 - DNA, 80 bp, synthetic construct; identical to SEQ ID NO: 13951
  source 1..80: mol_type = other DNA

SEQ ID NO: 74217 - DNA, 80 bp, synthetic construct; identical to SEQ ID NO: 40309
  source 1..80: mol_type = other DNA

SEQ ID NO: 74218 - DNA, 80 bp, synthetic construct; identical to SEQ ID NO: 40310
  source 1..80: mol_type = other DNA

SEQ ID NO: 74219 - DNA, 80 bp, synthetic construct; identical to SEQ ID NO: 40311
  source 1..80: mol_type = other DNA

SEQ ID NO: 74220 - DNA, 80 bp, synthetic construct; identical to SEQ ID NO: 13952
  source 1..80: mol_type = other DNA

SEQ ID NO: 74221 - DNA, 80 bp, synthetic construct; identical to SEQ ID NO: 40313
  source 1..80: mol_type = other DNA

SEQ ID NO: 74222 - DNA, 80 bp, synthetic construct; identical to SEQ ID NO: 40314
  source 1..80: mol_type = other DNA

SEQ ID NO: 74223 - DNA, 80 bp, synthetic construct; identical to SEQ ID NO: 40315
  source 1..80: mol_type = other DNA

SEQ ID NO: 74224 - DNA, 80 bp, synthetic construct; identical to SEQ ID NO: 13953
  source 1..80: mol_type = other DNA

SEQ ID NO: 74225 - DNA, 80 bp, synthetic construct; identical to SEQ ID NO: 40317
  source 1..80: mol_type = other DNA

SEQ ID NO: 74226 - DNA, 80 bp, synthetic construct; identical to SEQ ID NO: 40318
  source 1..80: mol_type = other DNA

SEQ ID NO: 74227 - DNA, 80 bp, synthetic construct; identical to SEQ ID NO: 40319
  source 1..80: mol_type = other DNA

SEQ ID NO: 74228 - DNA, 80 bp, synthetic construct; identical to SEQ ID NO: 13954
  source 1..80: mol_type = other DNA

SEQ ID NO: 74229 - DNA, 80 bp, synthetic construct; identical to SEQ ID NO: 40321
  source 1..80: mol_type = other DNA

SEQ ID NO: 74230 - DNA, 80 bp, synthetic construct; identical to SEQ ID NO: 40322
  source 1..80: mol_type = other DNA

SEQ ID NO: 74231 - DNA, 80 bp, synthetic construct; identical to SEQ ID NO: 40323
  source 1..80: mol_type = other DNA

SEQ ID NO: 74232 - DNA, 80 bp, synthetic construct; identical to SEQ ID NO: 13955
  source 1..80: mol_type = other DNA

SEQ ID NO: 74233 - DNA, 80 bp, synthetic construct; identical to SEQ ID NO: 40325
  source 1..80: mol_type = other DNA

SEQ ID NO: 74234 - DNA, 80 bp, synthetic construct; identical to SEQ ID NO: 40326
  source 1..80: mol_type = other DNA

SEQ ID NO: 74235 - DNA, 80 bp, synthetic construct; identical to SEQ ID NO: 13956
  source 1..80: mol_type = other DNA

SEQ ID NO: 74236 - DNA, 80 bp, synthetic construct; identical to SEQ ID NO: 40329
  source 1..80: mol_type = other DNA

SEQ ID NO: 74237 - DNA, 80 bp, synthetic construct; identical to SEQ ID NO: 40330
  source 1..80: mol_type = other DNA

SEQ ID NO: 74238 - DNA, 80 bp, synthetic construct; identical to SEQ ID NO: 40331
  source 1..80: mol_type = other DNA

SEQ ID NO: 74239 - DNA, 80 bp, synthetic construct; identical to SEQ ID NO: 40332
  source 1..80: mol_type = other DNA

SEQ ID NO: 74240 - DNA, 80 bp, synthetic construct; identical to SEQ ID NO: 13957
  source 1..80: mol_type = other DNA

SEQ ID NO: 74241 - DNA, 80 bp, synthetic construct; identical to SEQ ID NO: 40334
  source 1..80: mol_type = other DNA

SEQ ID NO: 74242 - DNA, 80 bp, synthetic construct; identical to SEQ ID NO: 40335
  source 1..80: mol_type = other DNA

SEQ ID NO: 74243 - DNA, 80 bp, synthetic construct; identical to SEQ ID NO: 13958
  source 1..80: mol_type = other DNA

SEQ ID NO: 74244 - DNA, 80 bp, synthetic construct; identical to SEQ ID NO: 40337
  source 1..80: mol_type = other DNA

SEQ ID NO: 74245 - DNA, 80 bp, synthetic construct; identical to SEQ ID NO: 40338
  source 1..80: mol_type = other DNA

SEQ ID NO: 74246 - DNA, 80 bp, synthetic construct; identical to SEQ ID NO: 40339
  source 1..80: mol_type = other DNA

SEQ ID NO: 74247 - DNA, 80 bp, synthetic construct; identical to SEQ ID NO: 13959
  source 1..80: mol_type = other DNA

SEQ ID NO: 74248 - DNA, 80 bp, synthetic construct; identical to SEQ ID NO: 40341
  source 1..80: mol_type = other DNA

SEQ ID NO: 74249 - DNA, 80 bp, synthetic construct; identical to SEQ ID NO: 40342
  source 1..80: mol_type = other DNA

SEQ ID NO: 74250 - DNA, 80 bp, synthetic construct; identical to SEQ ID NO: 40343
  source 1..80: mol_type = other DNA

SEQ ID NO: 74251 - DNA, 80 bp, synthetic construct; identical to SEQ ID NO: 13960
  source 1..80: mol_type = other DNA

SEQ ID NO: 74252 - DNA, 80 bp, synthetic construct; identical to SEQ ID NO: 40346
  source 1..80: mol_type = other DNA

SEQ ID NO: 74253 - DNA, 80 bp, synthetic construct; identical to SEQ ID NO: 40347
  source 1..80: mol_type = other DNA

SEQ ID NO: 74254 - DNA, 80 bp, synthetic construct; identical to SEQ ID NO: 13961
  source 1..80: mol_type = other DNA

SEQ ID NO: 74255 - DNA, 80 bp, synthetic construct; identical to SEQ ID NO: 40349
  source 1..80: mol_type = other DNA

SEQ ID NO: 74256 - DNA, 80 bp, synthetic construct; identical to SEQ ID NO: 40350
  source 1..80: mol_type = other DNA

SEQ ID NO: 74257 - DNA, 80 bp, synthetic construct; identical to SEQ ID NO: 40351
  source 1..80: mol_type = other DNA

SEQ ID NO: 74258 - DNA, 80 bp, synthetic construct; identical to SEQ ID NO: 13962
  source 1..80: mol_type = other DNA

SEQ ID NO: 74259 - DNA, 80 bp, synthetic construct; identical to SEQ ID NO: 40353
  source 1..80: mol_type = other DNA

SEQ ID NO: 74260 - DNA, 80 bp, synthetic construct; identical to SEQ ID NO: 40355
  source 1..80: mol_type = other DNA

SEQ ID NO: 74261 - DNA, 80 bp, synthetic construct; identical to SEQ ID NO: 13963
  source 1..80: mol_type = other DNA

SEQ ID NO: 74262 - DNA, 80 bp, synthetic construct; identical to SEQ ID NO: 40357
  source 1..80: mol_type = other DNA

SEQ ID NO: 74263 - DNA, 80 bp, synthetic construct; identical to SEQ ID NO: 40358
  source 1..80: mol_type = other DNA

SEQ ID NO: 74264 - DNA, 80 bp, synthetic construct; identical to SEQ ID NO: 40359
  source 1..80: mol_type = other DNA

SEQ ID NO: 74265 - DNA, 80 bp, synthetic construct; identical to SEQ ID NO: 13964
  source 1..80: mol_type = other DNA

SEQ ID NO: 74266 - DNA, 80 bp, synthetic construct; identical to SEQ ID NO: 40361
  source 1..80: mol_type = other DNA

SEQ ID NO: 74267 - DNA, 80 bp, synthetic construct; identical to SEQ ID NO: 40362
  source 1..80: mol_type = other DNA

SEQ ID NO: 74268 - DNA, 80 bp, synthetic construct; identical to SEQ ID NO: 40363
  source 1..80: mol_type = other DNA

SEQ ID NO: 74269 - DNA, 80 bp, synthetic construct; identical to SEQ ID NO: 40364
  source 1..80: mol_type = other DNA

SEQ ID NO: 74270 - DNA, 80 bp, synthetic construct; identical to SEQ ID NO: 13965
  source 1..80: mol_type = other DNA

SEQ ID NO: 74271 - DNA, 80 bp, synthetic construct; identical to SEQ ID NO: 40366
  source 1..80: mol_type = other DNA

SEQ ID NO: 74272 - DNA, 80 bp, synthetic construct; identical to SEQ ID NO: 40367
  source 1..80: mol_type = other DNA

SEQ ID NO: 74273 - DNA, 80 bp, synthetic construct; identical to SEQ ID NO: 40368
  source 1..80: mol_type = other DNA

SEQ ID NO: 74274 - DNA, 80 bp, synthetic construct; identical to SEQ ID NO: 13966
  source 1..80: mol_type = other DNA

SEQ ID NO: 74275 - DNA, 80 bp, synthetic construct; identical to SEQ ID NO: 40370
  source 1..80: mol_type = other DNA

SEQ ID NO: 74276 - DNA, 80 bp, synthetic construct; identical to SEQ ID NO: 40371
  source 1..80: mol_type = other DNA

SEQ ID NO: 74277 - DNA, 80 bp, synthetic construct; identical to SEQ ID NO: 40372
  source 1..80: mol_type = other DNA

SEQ ID NO: 74278 - DNA, 80 bp, synthetic construct; identical to SEQ ID NO: 13967
  source 1..80: mol_type = other DNA

SEQ ID NO: 74279 - DNA, 80 bp, synthetic construct; identical to SEQ ID NO: 40374
  source 1..80: mol_type = other DNA

SEQ ID NO: 74280 - DNA, 80 bp, synthetic construct; identical to SEQ ID NO: 40375
  source 1..80: mol_type = other DNA

SEQ ID NO: 74281 - DNA, 80 bp, synthetic construct; identical to SEQ ID NO: 40376
  source 1..80: mol_type = other DNA

SEQ ID NO: 74282 - DNA, 80 bp, synthetic construct; identical to SEQ ID NO: 13968
  source 1..80: mol_type = other DNA

SEQ ID NO: 74283 - DNA, 80 bp, synthetic construct; identical to SEQ ID NO: 40378
  source 1..80: mol_type = other DNA

SEQ ID NO: 74284 - DNA, 80 bp, synthetic construct; identical to SEQ ID NO: 40379
  source 1..80: mol_type = other DNA

SEQ ID NO: 74285 - DNA, 80 bp, synthetic construct; identical to SEQ ID NO: 40380
  source 1..80: mol_type = other DNA

SEQ ID NO: 74286 - DNA, 80 bp, synthetic construct; identical to SEQ ID NO: 13969
  source 1..80: mol_type = other DNA

SEQ ID NO: 74287 - DNA, 80 bp, synthetic construct; identical to SEQ ID NO: 40382
  source 1..80: mol_type = other DNA

SEQ ID NO: 74288 - DNA, 80 bp, synthetic construct; identical to SEQ ID NO: 40383
  source 1..80: mol_type = other DNA

SEQ ID NO: 74289 - DNA, 80 bp, synthetic construct; identical to SEQ ID NO: 13970
  source 1..80: mol_type = other DNA

SEQ ID NO: 74290 - DNA, 80 bp, synthetic construct; identical to SEQ ID NO: 40385
  source 1..80: mol_type = other DNA

SEQ ID NO: 74291 - DNA, 80 bp, synthetic construct; identical to SEQ ID NO: 40386
  source 1..80: mol_type = other DNA

SEQ ID NO: 74292 - DNA, 80 bp, synthetic construct; identical to SEQ ID NO: 40387
  source 1..80: mol_type = other DNA

SEQ ID NO: 74293 - DNA, 80 bp, synthetic construct; identical to SEQ ID NO: 13971
  source 1..80: mol_type = other DNA

SEQ ID NO: 74294 - DNA, 80 bp, synthetic construct; identical to SEQ ID NO: 40390
  source 1..80: mol_type = other DNA

SEQ ID NO: 74295 - DNA, 80 bp, synthetic construct; identical to SEQ ID NO: 40391
  source 1..80: mol_type = other DNA

SEQ ID NO: 74296 - DNA, 80 bp, synthetic construct; identical to SEQ ID NO: 13972
  source 1..80: mol_type = other DNA

SEQ ID NO: 74297 - DNA, 80 bp, synthetic construct; identical to SEQ ID NO: 40393
  source 1..80: mol_type = other DNA

SEQ ID NO: 74298 - DNA, 80 bp, synthetic construct; identical to SEQ ID NO: 40394
  source 1..80: mol_type = other DNA

SEQ ID NO: 74299 - DNA, 80 bp, synthetic construct; identical to SEQ ID NO: 40395
  source 1..80: mol_type = other DNA

SEQ ID NO: 74300 - DNA, 80 bp, synthetic construct; identical to SEQ ID NO: 13973
  source 1..80: mol_type = other DNA

SEQ ID NO: 74301 - DNA, 80 bp, synthetic construct; identical to SEQ ID NO: 40397
  source 1..80: mol_type = other DNA

SEQ ID NO: 74302 - DNA, 80 bp, synthetic construct; identical to SEQ ID NO: 40398
  source 1..80: mol_type = other DNA

SEQ ID NO: 74303 - DNA, 80 bp, synthetic construct; identical to SEQ ID NO: 40399
  source 1..80: mol_type = other DNA

SEQ ID NO: 74304 - DNA, 80 bp, synthetic construct; identical to SEQ ID NO: 13974
  source 1..80: mol_type = other DNA

SEQ ID NO: 74305 - DNA, 80 bp, synthetic construct; identical to SEQ ID NO: 40401
  source 1..80: mol_type = other DNA

SEQ ID NO: 74306 - DNA, 80 bp, synthetic construct; identical to SEQ ID NO: 40402
  source 1..80: mol_type = other DNA

SEQ ID NO: 74307 - DNA, 80 bp, synthetic construct; identical to SEQ ID NO: 40403
  source 1..80: mol_type = other DNA

SEQ ID NO: 74308 - DNA, 80 bp, synthetic construct; identical to SEQ ID NO: 13975
  source 1..80: mol_type = other DNA

SEQ ID NO: 74309 - DNA, 80 bp, synthetic construct; identical to SEQ ID NO: 40405
  source 1..80: mol_type = other DNA

SEQ ID NO: 74310 - DNA, 80 bp, synthetic construct; identical to SEQ ID NO: 40406
  source 1..80: mol_type = other DNA

SEQ ID NO: 74311 - DNA, 80 bp, synthetic construct; identical to SEQ ID NO: 40407
  source 1..80: mol_type = other DNA

SEQ ID NO: 74312 - DNA, 80 bp, synthetic construct; identical to SEQ ID NO: 40408
  source 1..80: mol_type = other DNA

SEQ ID NO: 74313 - DNA, 80 bp, synthetic construct; identical to SEQ ID NO: 13976
  source 1..80: mol_type = other DNA

SEQ ID NO: 74314 - DNA, 80 bp, synthetic construct; identical to SEQ ID NO: 40410
  source 1..80: mol_type = other DNA

SEQ ID NO: 74315 - DNA, 80 bp, synthetic construct; identical to SEQ ID NO: 40411
  source 1..80: mol_type = other DNA

SEQ ID NO: 74316 - DNA, 80 bp, synthetic construct; identical to SEQ ID NO: 40412
  source 1..80: mol_type = other DNA

SEQ ID NO: 74317 - DNA, 80 bp, synthetic construct; identical to SEQ ID NO: 13977
  source 1..80: mol_type = other DNA

SEQ ID NO: 74318 - DNA, 80 bp, synthetic construct; identical to SEQ ID NO: 40414
  source 1..80: mol_type = other DNA

SEQ ID NO: 74319 - DNA, 80 bp, synthetic construct; identical to SEQ ID NO: 40415
  source 1..80: mol_type = other DNA

SEQ ID NO: 74320 - DNA, 80 bp, synthetic construct; identical to SEQ ID NO: 40416
  source 1..80: mol_type = other DNA

SEQ ID NO: 74321 - DNA, 80 bp, synthetic construct; identical to SEQ ID NO: 13978
  source 1..80: mol_type = other DNA

SEQ ID NO: 74322 - DNA, 80 bp, synthetic construct; identical to SEQ ID NO: 40418
  source 1..80: mol_type = other DNA

SEQ ID NO: 74323 - DNA, 80 bp, synthetic construct; identical to SEQ ID NO: 40419
  source 1..80: mol_type = other DNA

SEQ ID NO: 74324 - DNA, 80 bp, synthetic construct; identical to SEQ ID NO: 13979
  source 1..80: mol_type = other DNA

SEQ ID NO: 74325 - DNA, 80 bp, synthetic construct; identical to SEQ ID NO: 40421
  source 1..80: mol_type = other DNA

SEQ ID NO: 74326 - DNA, 80 bp, synthetic construct; identical to SEQ ID NO: 40422
  source 1..80: mol_type = other DNA

SEQ ID NO: 74327 - DNA, 80 bp, synthetic construct; identical to SEQ ID NO: 40423
  source 1..80: mol_type = other DNA

SEQ ID NO: 74328 - DNA, 80 bp, synthetic construct; identical to SEQ ID NO: 13980
  source 1..80: mol_type = other DNA

SEQ ID NO: 74329 - DNA, 80 bp, synthetic construct; identical to SEQ ID NO: 40425
  source 1..80: mol_type = other DNA

SEQ ID NO: 74330 - DNA, 80 bp, synthetic construct; identical to SEQ ID NO: 40426
  source 1..80: mol_type = other DNA

SEQ ID NO: 74331 - DNA, 80 bp, synthetic construct; identical to SEQ ID NO: 40427
  source 1..80: mol_type = other DNA

SEQ ID NO: 74332 - DNA, 80 bp, synthetic construct; identical to SEQ ID NO: 13981
  source 1..80: mol_type = other DNA

SEQ ID NO: 74333 - DNA, 80 bp, synthetic construct; identical to SEQ ID NO: 40429
  source 1..80: mol_type = other DNA

SEQ ID NO: 74334 - DNA, 80 bp, synthetic construct; identical to SEQ ID NO: 40430
  source 1..80: mol_type = other DNA

SEQ ID NO: 74335 - DNA, 80 bp, synthetic construct; identical to SEQ ID NO: 40431
  source 1..80: mol_type = other DNA

SEQ ID NO: 74336 - DNA, 80 bp, synthetic construct; identical to SEQ ID NO: 13982
  source 1..80: mol_type = other DNA

SEQ ID NO: 74337 - DNA, 80 bp, synthetic construct; identical to SEQ ID NO: 40433
  source 1..80: mol_type = other DNA

SEQ ID NO: 74338 - DNA, 80 bp, synthetic construct; identical to SEQ ID NO: 40434
  source 1..80: mol_type = other DNA

SEQ ID NO: 74339 - DNA, 80 bp, synthetic construct; identical to SEQ ID NO: 40435
  source 1..80: mol_type = other DNA

SEQ ID NO: 74340 - DNA, 80 bp, synthetic construct; identical to SEQ ID NO: 13983
  source 1..80: mol_type = other DNA

SEQ ID NO: 74341 - DNA, 80 bp, synthetic construct; identical to SEQ ID NO: 40439
  source 1..80: mol_type = other DNA

SEQ ID NO: 74342 - DNA, 80 bp, synthetic construct; identical to SEQ ID NO: 13984
  source 1..80: mol_type = other DNA

SEQ ID NO: 74343 - DNA, 80 bp, synthetic construct; identical to SEQ ID NO: 40441
  source 1..80: mol_type = other DNA

SEQ ID NO: 74344 - DNA, 80 bp, synthetic construct; identical to SEQ ID NO: 40442
  source 1..80: mol_type = other DNA

SEQ ID NO: 74345 - DNA, 80 bp, synthetic construct; identical to SEQ ID NO: 40443
  source 1..80: mol_type = other DNA

SEQ ID NO: 74346 - DNA, 80 bp, synthetic construct; identical to SEQ ID NO: 40444
  source 1..80: mol_type = other DNA

SEQ ID NO: 74347 - DNA, 80 bp, synthetic construct; identical to SEQ ID NO: 13985
  source 1..80: mol_type = other DNA

SEQ ID NO: 74348 - DNA, 80 bp, synthetic construct; identical to SEQ ID NO: 40446
  source 1..80: mol_type = other DNA

SEQ ID NO: 74349 - DNA, 80 bp, synthetic construct; identical to SEQ ID NO: 40447
  source 1..80: mol_type = other DNA

SEQ ID NO: 74350 - DNA, 80 bp, synthetic construct; identical to SEQ ID NO: 40448
  source 1..80: mol_type = other DNA

SEQ ID NO: 74351 - DNA, 80 bp, synthetic construct; identical to SEQ ID NO: 13986
  source 1..80: mol_type = other DNA

SEQ ID NO: 74352 - DNA, 80 bp, synthetic construct; identical to SEQ ID NO: 40450
  source 1..80: mol_type = other DNA

SEQ ID NO: 74353 - DNA, 80 bp, synthetic construct; identical to SEQ ID NO: 40451
  source 1..80: mol_type = other DNA

SEQ ID NO: 74354 - DNA, 80 bp, synthetic construct; identical to SEQ ID NO: 40452
  source 1..80: mol_type = other DNA

SEQ ID NO: 74355 - DNA, 80 bp, synthetic construct; identical to SEQ ID NO: 13987
  source 1..80: mol_type = other DNA

SEQ ID NO: 74356 - DNA, 80 bp, synthetic construct; identical to SEQ ID NO: 40454
  source 1..80: mol_type = other DNA

SEQ ID NO: 74357 - DNA, 80 bp, synthetic construct; identical to SEQ ID NO: 40455
  source 1..80: mol_type = other DNA

SEQ ID NO: 74358 - DNA, 80 bp, synthetic construct; identical to SEQ ID NO: 40456
  source 1..80: mol_type = other DNA

SEQ ID NO: 74359 - DNA, 80 bp, synthetic construct; identical to SEQ ID NO: 40457
  source 1..80: mol_type = other DNA

SEQ ID NO: 74360 - DNA, 80 bp, synthetic construct; identical to SEQ ID NO: 40458
  source 1..80: mol_type = other DNA

SEQ ID NO: 74361 - DNA, 80 bp, synthetic construct; identical to SEQ ID NO: 40459
  source 1..80: mol_type = other DNA

SEQ ID NO: 74362 - DNA, 80 bp, synthetic construct; identical to SEQ ID NO: 13988
  source 1..80: mol_type = other DNA

SEQ ID NO: 74363 - DNA, 80 bp, synthetic construct; identical to SEQ ID NO: 40461
  source 1..80: mol_type = other DNA

SEQ ID NO: 74364 - DNA, 80 bp, synthetic construct; identical to SEQ ID NO: 40462
  source 1..80: mol_type = other DNA

SEQ ID NO: 74365 - DNA, 80 bp, synthetic construct; identical to SEQ ID NO: 40463
  source 1..80: mol_type = other DNA

SEQ ID NO: 74366 - DNA, 80 bp, synthetic construct; identical to SEQ ID NO: 13989
  source 1..80: mol_type = other DNA

SEQ ID NO: 74367 - DNA, 80 bp, synthetic construct; identical to SEQ ID NO: 40465
  source 1..80: mol_type = other DNA

SEQ ID NO: 74368 - DNA, 80 bp, synthetic construct; identical to SEQ ID NO: 40466
  source 1..80: mol_type = other DNA

SEQ ID NO: 74369 - DNA, 80 bp, synthetic construct; identical to SEQ ID NO: 13990
  source 1..80: mol_type = other DNA

SEQ ID NO: 74370 - DNA, 80 bp, synthetic construct; identical to SEQ ID NO: 40469
  source 1..80: mol_type = other DNA

SEQ ID NO: 74371 - DNA, 80 bp, synthetic construct; identical to SEQ ID NO: 40470
  source 1..80: mol_type = other DNA

SEQ ID NO: 74372 - DNA, 80 bp, synthetic construct; identical to SEQ ID NO: 40471
  source 1..80: mol_type = other DNA

SEQ ID NO: 74373 - DNA, 80 bp, synthetic construct; identical to SEQ ID NO: 13991
  source 1..80: mol_type = other DNA

SEQ ID NO: 74374 - DNA, 80 bp, synthetic construct; identical to SEQ ID NO: 40474
  source 1..80: mol_type = other DNA

SEQ ID NO: 74375 - DNA, 80 bp, synthetic construct; identical to SEQ ID NO: 13992
  source 1..80: mol_type = other DNA

SEQ ID NO: 74376 - DNA, 80 bp, synthetic construct; identical to SEQ ID NO: 40477
  source 1..80: mol_type = other DNA

SEQ ID NO: 74377 - DNA, 80 bp, synthetic construct; identical to SEQ ID NO: 40478
  source 1..80: mol_type = other DNA

SEQ ID NO: 74378 - DNA, 80 bp, synthetic construct; identical to SEQ ID NO: 13993
  source 1..80: mol_type = other DNA

SEQ ID NO: 74379 - DNA, 80 bp, synthetic construct; identical to SEQ ID NO: 40480
  source 1..80: mol_type = other DNA

SEQ ID NO: 74380 - DNA, 80 bp, synthetic construct; identical to SEQ ID NO: 40482
  source 1..80: mol_type = other DNA

SEQ ID NO: 74381 - DNA, 80 bp, synthetic construct; identical to SEQ ID NO: 13994
  source 1..80: mol_type = other DNA

SEQ ID NO: 74382 - DNA, 80 bp, synthetic construct; identical to SEQ ID NO: 40484
  source 1..80: mol_type = other DNA

SEQ ID NO: 74383 - DNA, 80 bp, synthetic construct; identical to SEQ ID NO: 40485
  source 1..80: mol_type = other DNA

SEQ ID NO: 74384 - DNA, 80 bp, synthetic construct; identical to SEQ ID NO: 40486
  source 1..80: mol_type = other DNA

SEQ ID NO: 74385 - DNA, 80 bp, synthetic construct; identical to SEQ ID NO: 13995
  source 1..80: mol_type = other DNA

SEQ ID NO: 74386 - DNA, 80 bp, synthetic construct; identical to SEQ ID NO: 40489
  source 1..80: mol_type = other DNA

SEQ ID NO: 74387 - DNA, 80 bp, synthetic construct; identical to SEQ ID NO: 40490
  source 1..80: mol_type = other DNA

SEQ ID NO: 74388 - DNA, 80 bp, synthetic construct; identical to SEQ ID NO: 40491
  source 1..80: mol_type = other DNA

SEQ ID NO: 74389 - DNA, 80 bp, synthetic construct; identical to SEQ ID NO: 13996
  source 1..80: mol_type = other DNA

SEQ ID NO: 74390 - DNA, 80 bp, synthetic construct; identical to SEQ ID NO: 40493
  source 1..80: mol_type = other DNA

SEQ ID NO: 74391 - DNA, 80 bp, synthetic construct; identical to SEQ ID NO: 40494
  source 1..80: mol_type = other DNA

SEQ ID NO: 74392 - DNA, 80 bp, synthetic construct; identical to SEQ ID NO: 13997
  source 1..80: mol_type = other DNA

SEQ ID NO: 74393 - DNA, 80 bp, synthetic construct; identical to SEQ ID NO: 40496
  source 1..80: mol_type = other DNA

SEQ ID NO: 74394 - DNA, 80 bp, synthetic construct; identical to SEQ ID NO: 40497
  source 1..80: mol_type = other DNA

SEQ ID NO: 74395 - DNA, 80 bp, synthetic construct; identical to SEQ ID NO: 40498
  source 1..80: mol_type = other DNA

SEQ ID NO: 74396 - DNA, 80 bp, synthetic construct; identical to SEQ ID NO: 40499
  source 1..80: mol_type = other DNA

SEQ ID NO: 74397 - DNA, 80 bp, synthetic construct; identical to SEQ ID NO: 13998
  source 1..80: mol_type = other DNA

SEQ ID NO: 74398 - DNA, 80 bp, synthetic construct; identical to SEQ ID NO: 40501
  source 1..80: mol_type = other DNA

SEQ ID NO: 74399 - DNA, 80 bp, synthetic construct; identical to SEQ ID NO: 40502
  source 1..80: mol_type = other DNA

SEQ ID NO: 74400 - DNA, 80 bp, synthetic construct; identical to SEQ ID NO: 40503
  source 1..80: mol_type = other DNA

SEQ ID NO: 74401 - DNA, 80 bp, synthetic construct; identical to SEQ ID NO: 13999
  source 1..80: mol_type = other DNA

SEQ ID NO: 74402 - DNA, 80 bp, synthetic construct; identical to SEQ ID NO: 40505
  source 1..80: mol_type = other DNA

SEQ ID NO: 74403 - DNA, 80 bp, synthetic construct; identical to SEQ ID NO: 40507
  source 1..80: mol_type = other DNA

SEQ ID NO: 74404 - DNA, 80 bp, synthetic construct; identical to SEQ ID NO: 14000
  source 1..80: mol_type = other DNA

SEQ ID NO: 74405 - DNA, 80 bp, synthetic construct; identical to SEQ ID NO: 40509
  source 1..80: mol_type = other DNA

SEQ ID NO: 74406 - DNA, 80 bp, synthetic construct; identical to SEQ ID NO: 40510
  source 1..80: mol_type = other DNA

SEQ ID NO: 74407 - DNA, 80 bp, synthetic construct; identical to SEQ ID NO: 40511
  source 1..80: mol_type = other DNA

SEQ ID NO: 74408 - DNA, 80 bp, synthetic construct; identical to SEQ ID NO: 14001
  source 1..80: mol_type = other DNA

SEQ ID NO: 74409 - DNA, 80 bp, synthetic construct; identical to SEQ ID NO: 40514
  source 1..80: mol_type = other DNA

SEQ ID NO: 74410 - DNA, 80 bp, synthetic construct; identical to SEQ ID NO: 40515
  source 1..80: mol_type = other DNA

SEQ ID NO: 74411 - DNA, 80 bp, synthetic construct; identical to SEQ ID NO: 14002
  source 1..80: mol_type = other DNA

SEQ ID NO: 74412 - DNA, 80 bp, synthetic construct; identical to SEQ ID NO: 40517
  source 1..80: mol_type = other DNA

SEQ ID NO: 74413 - DNA, 80 bp, synthetic construct; identical to SEQ ID NO: 40518
  source 1..80: mol_type = other DNA

SEQ ID NO: 74414 - DNA, 80 bp, synthetic construct; identical to SEQ ID NO: 40519
  source 1..80: mol_type = other DNA

SEQ ID NO: 74415 - DNA, 80 bp, synthetic construct; identical to SEQ ID NO: 14003
  source 1..80: mol_type = other DNA

SEQ ID NO: 74416 - DNA, 80 bp, synthetic construct; identical to SEQ ID NO: 40521
  source 1..80: mol_type = other DNA

SEQ ID NO: 74417 - DNA, 80 bp, synthetic construct; identical to SEQ ID NO: 40522
  source 1..80: mol_type = other DNA

SEQ ID NO: 74418 - DNA, 80 bp, synthetic construct; identical to SEQ ID NO: 40523
  source 1..80: mol_type = other DNA

SEQ ID NO: 74419 - DNA, 80 bp, synthetic construct; identical to SEQ ID NO: 14004
  source 1..80: mol_type = other DNA

SEQ ID NO: 74420 - DNA, 80 bp, synthetic construct; identical to SEQ ID NO: 40526
  source 1..80: mol_type = other DNA

SEQ ID NO: 74421 - DNA, 80 bp, synthetic construct; identical to SEQ ID NO: 40527
  source 1..80: mol_type = other DNA

SEQ ID NO: 74422 - DNA, 80 bp, synthetic construct; identical to SEQ ID NO: 40528
  source 1..80: mol_type = other DNA

SEQ ID NO: 74423 - DNA, 80 bp, synthetic construct; identical to SEQ ID NO: 14005
  source 1..80: mol_type = other DNA

SEQ ID NO: 74424 - DNA, 80 bp, synthetic construct; identical to SEQ ID NO: 40530
  source 1..80: mol_type = other DNA

SEQ ID NO: 74425 - DNA, 80 bp, synthetic construct; identical to SEQ ID NO: 40531
  source 1..80: mol_type = other DNA

SEQ ID NO: 74426 - DNA, 80 bp, synthetic construct; identical to SEQ ID NO: 14006
  source 1..80: mol_type = other DNA

SEQ ID NO: 74427 - DNA, 80 bp, synthetic construct; identical to SEQ ID NO: 40533
  source 1..80: mol_type = other DNA

SEQ ID NO: 74428 - DNA, 80 bp, synthetic construct; identical to SEQ ID NO: 40534
  source 1..80: mol_type = other DNA

SEQ ID NO: 74429 - DNA, 80 bp, synthetic construct; identical to SEQ ID NO: 40535
  source 1..80: mol_type = other DNA

SEQ ID NO: 74430 - DNA, 80 bp, synthetic construct; identical to SEQ ID NO: 40536
  source 1..80: mol_type = other DNA

SEQ ID NO: 74431 - DNA, 80 bp, synthetic construct; identical to SEQ ID NO: 14007
  source 1..80: mol_type = other DNA

SEQ ID NO: 74432 - DNA, 80 bp, synthetic construct; identical to SEQ ID NO: 40538
  source 1..80: mol_type = other DNA

SEQ ID NO: 74433 - DNA, 80 bp, synthetic construct; identical to SEQ ID NO: 40539
  source 1..80: mol_type = other DNA

SEQ ID NO: 74434 - DNA, 80 bp, synthetic construct; identical to SEQ ID NO: 40540
  source 1..80: mol_type = other DNA

SEQ ID NO: 74435 - DNA, 80 bp, synthetic construct; identical to SEQ ID NO: 14008
  source 1..80: mol_type = other DNA

SEQ ID NO: 74436 - DNA, 80 bp, synthetic construct; identical to SEQ ID NO: 40542
  source 1..80: mol_type = other DNA

SEQ ID NO: 74437 - DNA, 80 bp, synthetic construct; identical to SEQ ID NO: 40543
  source 1..80: mol_type = other DNA

SEQ ID NO: 74438 - DNA, 80 bp, synthetic construct; identical to SEQ ID NO: 40544
  source 1..80: mol_type = other DNA

SEQ ID NO: 74439 - DNA, 80 bp, synthetic construct; identical to SEQ ID NO: 14009
  source 1..80: mol_type = other DNA

SEQ ID NO: 74440 - DNA, 80 bp, synthetic construct; identical to SEQ ID NO: 40546
  source 1..80: mol_type = other DNA

SEQ ID NO: 74441 - DNA, 80 bp, synthetic construct; identical to SEQ ID NO: 40547
  source 1..80: mol_type = other DNA

SEQ ID NO: 74442 - DNA, 80 bp, synthetic construct; identical to SEQ ID NO: 14010
  source 1..80: mol_type = other DNA

SEQ ID NO: 74443 - DNA, 80 bp, synthetic construct; identical to SEQ ID NO: 40550
  source 1..80: mol_type = other DNA

SEQ ID NO: 74444 - DNA, 80 bp, synthetic construct; identical to SEQ ID NO: 40551
  source 1..80: mol_type = other DNA

SEQ ID NO: 74445 - DNA, 80 bp, synthetic construct; identical to SEQ ID NO: 40552
  source 1..80: mol_type = other DNA

SEQ ID NO: 74446 - DNA, 80 bp, synthetic construct; identical to SEQ ID NO: 14011
  source 1..80: mol_type = other DNA

SEQ ID NO: 74447 - DNA, 80 bp, synthetic construct; identical to SEQ ID NO: 40555
  source 1..80: mol_type = other DNA

SEQ ID NO: 74448 - DNA, 80 bp, synthetic construct; identical to SEQ ID NO: 14012
  source 1..80: mol_type = other DNA

SEQ ID NO: 74449 - DNA, 80 bp, synthetic construct; identical to SEQ ID NO: 40557
  source 1..80: mol_type = other DNA

SEQ ID NO: 74450 - DNA, 80 bp, synthetic construct; identical to SEQ ID NO: 40558
  source 1..80: mol_type = other DNA

SEQ ID NO: 74451 - DNA, 80 bp, synthetic construct; identical to SEQ ID NO: 40559
  source 1..80: mol_type = other DNA

SEQ ID NO: 74452 - DNA, 80 bp, synthetic construct; identical to SEQ ID NO: 14013
  source 1..80: mol_type = other DNA

SEQ ID NO: 74453 - DNA, 80 bp, synthetic construct; identical to SEQ ID NO: 40561
  source 1..80: mol_type = other DNA

SEQ ID NO: 74454 - DNA, 80 bp, synthetic construct; identical to SEQ ID NO: 40562
  source 1..80: mol_type = other DNA

SEQ ID NO: 74455 - DNA, 80 bp, synthetic construct; identical to SEQ ID NO: 40563
  source 1..80: mol_type = other DNA

SEQ ID NO: 74456 - DNA, 80 bp, synthetic construct; identical to SEQ ID NO: 40564
  source 1..80: mol_type = other DNA

SEQ ID NO: 74457 - DNA, 80 bp, synthetic construct; identical to SEQ ID NO: 14014
  source 1..80: mol_type = other DNA

SEQ ID NO: 74458 - DNA, 80 bp, synthetic construct; identical to SEQ ID NO: 40567
  source 1..80: mol_type = other DNA

SEQ ID NO: 74459 - DNA, 80 bp, synthetic construct; identical to SEQ ID NO: 14015
  source 1..80: mol_type = other DNA

SEQ ID NO: 74460 - DNA, 80 bp, synthetic construct; identical to SEQ ID NO: 40570
  source 1..80: mol_type = other DNA

SEQ ID NO: 74461 - DNA, 80 bp, synthetic construct; identical to SEQ ID NO: 40571
  source 1..80: mol_type = other DNA

SEQ ID NO: 74462 - DNA, 80 bp, synthetic construct; identical to SEQ ID NO: 14016
  source 1..80: mol_type = other DNA

SEQ ID NO: 74463 - DNA, 80 bp, synthetic construct; identical to SEQ ID NO: 40574
  source 1..80: mol_type = other DNA

SEQ ID NO: 74464 - DNA, 80 bp, synthetic construct; identical to SEQ ID NO: 40575
  source 1..80: mol_type = other DNA

SEQ ID NO: 74465 - DNA, 80 bp, synthetic construct; identical to SEQ ID NO: 40576
  source 1..80: mol_type = other DNA

SEQ ID NO: 74466 - DNA, 80 bp, synthetic construct; identical to SEQ ID NO: 14017
  source 1..80: mol_type = other DNA

SEQ ID NO: 74467 - DNA, 80 bp, synthetic construct; identical to SEQ ID NO: 40579
  source 1..80: mol_type = other DNA

SEQ ID NO: 74468 - DNA, 80 bp, synthetic construct; identical to SEQ ID NO: 14018
  source 1..80: mol_type = other DNA

SEQ ID NO: 74469 - DNA, 80 bp, synthetic construct; identical to SEQ ID NO: 40581
  source 1..80: mol_type = other DNA

SEQ ID NO: 74470 - DNA, 80 bp, synthetic construct; identical to SEQ ID NO: 40582
  source 1..80: mol_type = other DNA

SEQ ID NO: 74471 - DNA, 80 bp, synthetic construct; identical to SEQ ID NO: 40583
  source 1..80: mol_type = other DNA

SEQ ID NO: 74472 - DNA, 80 bp, synthetic construct; identical to SEQ ID NO: 40584
  source 1..80: mol_type = other DNA

SEQ ID NO: 74473 - DNA, 80 bp, synthetic construct; identical to SEQ ID NO: 14019
  source 1..80: mol_type = other DNA

SEQ ID NO: 74474 - DNA, 80 bp, synthetic construct; identical to SEQ ID NO: 40586
  source 1..80: mol_type = other DNA

SEQ ID NO: 74475 - DNA, 80 bp, synthetic construct; identical to SEQ ID NO: 40587
  source 1..80: mol_type = other DNA

SEQ ID NO: 74476 - DNA, 80 bp, synthetic construct; identical to SEQ ID NO: 14020
  source 1..80: mol_type = other DNA

SEQ ID NO: 74477 - DNA, 80 bp, synthetic construct; identical to SEQ ID NO: 40589
  source 1..80: mol_type = other DNA

SEQ ID NO: 74478 - DNA, 80 bp, synthetic construct; identical to SEQ ID NO: 40590
  source 1..80: mol_type = other DNA

SEQ ID NO: 74479 - DNA, 80 bp, synthetic construct; identical to SEQ ID NO: 14021
  source 1..80: mol_type = other DNA

SEQ ID NO: 74480 - DNA, 80 bp, synthetic construct; identical to SEQ ID NO: 40593
  source 1..80: mol_type = other DNA

SEQ ID NO: 74481 - DNA, 80 bp, synthetic construct; identical to SEQ ID NO: 40595
  source 1..80: mol_type = other DNA

SEQ ID NO: 74482 - DNA, 80 bp, synthetic construct; identical to SEQ ID NO: 14022
  source 1..80: mol_type = other DNA

SEQ ID NO: 74483 - DNA, 80 bp, synthetic construct; identical to SEQ ID NO: 40597
  source 1..80: mol_type = other DNA

SEQ ID NO: 74484 - DNA, 80 bp, synthetic construct; identical to SEQ ID NO: 40599
  source 1..80: mol_type = other DNA

SEQ ID NO: 74485 - DNA, 80 bp, synthetic construct; identical to SEQ ID NO: 40600
  source 1..80: mol_type = other DNA

SEQ ID NO: 74486 - DNA, 80 bp, synthetic construct; identical to SEQ ID NO: 14023
  source 1..80: mol_type = other DNA

SEQ ID NO: 74487 - DNA, 80 bp, synthetic construct; identical to SEQ ID NO: 40602
  source 1..80: mol_type = other DNA

SEQ ID NO: 74488 - DNA, 80 bp, synthetic construct; identical to SEQ ID NO: 40603
  source 1..80: mol_type = other DNA

SEQ ID NO: 74489 - DNA, 80 bp, synthetic construct; identical to SEQ ID NO: 14024
  source 1..80: mol_type = other DNA

SEQ ID NO: 74490 - DNA, 80 bp, synthetic construct; identical to SEQ ID NO: 40607
  source 1..80: mol_type = other DNA

SEQ ID NO: 74491 - DNA, 80 bp, synthetic construct; identical to SEQ ID NO: 40608
  source 1..80: mol_type = other DNA

SEQ ID NO: 74492 - DNA, 80 bp, synthetic construct; identical to SEQ ID NO: 14025
  source 1..80: mol_type = other DNA

SEQ ID NO: 74493 - DNA, 80 bp, synthetic construct; identical to SEQ ID NO: 40610
  source 1..80: mol_type = other DNA

SEQ ID NO: 74494 - DNA, 80 bp, synthetic construct; identical to SEQ ID NO: 40611
  source 1..80: mol_type = other DNA

SEQ ID NO: 74495 - DNA, 80 bp, synthetic construct; identical to SEQ ID NO: 14026
  source 1..80: mol_type = other DNA

SEQ ID NO: 74496 - DNA, 80 bp, synthetic construct; identical to SEQ ID NO: 40613
  source 1..80: mol_type = other DNA

SEQ ID NO: 74497 - DNA, 80 bp, synthetic construct; identical to SEQ ID NO: 40614
  source 1..80: mol_type = other DNA

SEQ ID NO: 74498 - DNA, 80 bp, synthetic construct; identical to SEQ ID NO: 40615
  source 1..80: mol_type = other DNA

SEQ ID NO: 74499 - DNA, 80 bp, synthetic construct; identical to SEQ ID NO: 14027
  source 1..80: mol_type = other DNA

SEQ ID NO: 74500 - DNA, 80 bp, synthetic construct; identical to SEQ ID NO: 40618
  source 1..80: mol_type = other DNA

SEQ ID NO: 74501 - DNA, 80 bp, synthetic construct; identical to SEQ ID NO: 40619
  source 1..80: mol_type = other DNA

SEQ ID NO: 74502 - DNA, 80 bp, synthetic construct; identical to SEQ ID NO: 14028
  source 1..80: mol_type = other DNA

SEQ ID NO: 74503 - DNA, 80 bp, synthetic construct; identical to SEQ ID NO: 40622
  source 1..80: mol_type = other DNA

SEQ ID NO: 74504 - DNA, 80 bp, synthetic construct; identical to SEQ ID NO: 40623
  source 1..80: mol_type = other DNA

SEQ ID NO: 74505 - DNA, 80 bp, synthetic construct; identical to SEQ ID NO: 40625
  source 1..80: mol_type = other DNA

SEQ ID NO: 74506 - DNA, 80 bp, synthetic construct; identical to SEQ ID NO: 40626
  source 1..80: mol_type = other DNA

SEQ ID NO: 74507 - DNA, 80 bp, synthetic construct; identical to SEQ ID NO: 40627
  source 1..80: mol_type = other DNA

SEQ ID NO: 74508 - DNA, 80 bp, synthetic construct; identical to SEQ ID NO: 14030
  source 1..80: mol_type = other DNA

SEQ ID NO: 74509 - DNA, 80 bp, synthetic construct; identical to SEQ ID NO: 40630
  source 1..80: mol_type = other DNA

SEQ ID NO: 74510 - DNA, 80 bp, synthetic construct; identical to SEQ ID NO: 40631
  source 1..80: mol_type = other DNA

SEQ ID NO: 74511 - DNA, 80 bp, synthetic construct; identical to SEQ ID NO: 14031
  source 1..80: mol_type = other DNA

SEQ ID NO: 74512 - DNA, 80 bp, synthetic construct; identical to SEQ ID NO: 40633
  source 1..80: mol_type = other DNA

SEQ ID NO: 74513 - DNA, 80 bp, synthetic construct; identical to SEQ ID NO: 40634
  source 1..80: mol_type = other DNA

SEQ ID NO: 74514 - DNA, 80 bp, synthetic construct; identical to SEQ ID NO: 40635
  source 1..80: mol_type = other DNA

SEQ ID NO: 74515 - DNA, 80 bp, synthetic construct; identical to SEQ ID NO: 14032
  source 1..80: mol_type = other DNA

SEQ ID NO: 74516 - DNA, 80 bp, synthetic construct; identical to SEQ ID NO: 40638
  source 1..80: mol_type = other DNA

SEQ ID NO: 74517 - DNA, 80 bp, synthetic construct; identical to SEQ ID NO: 14033
  source 1..80: mol_type = other DNA

SEQ ID NO: 74518 - DNA, 80 bp, synthetic construct; identical to SEQ ID NO: 40641
  source 1..80: mol_type = other DNA

SEQ ID NO: 74519 - DNA, 80 bp, synthetic construct; identical to SEQ ID NO: 40642
  source 1..80: mol_type = other DNA

SEQ ID NO: 74520 - DNA, 80 bp, synthetic construct; identical to SEQ ID NO: 40643
  source 1..80: mol_type = other DNA

SEQ ID NO: 74521 - DNA, 80 bp, synthetic construct; identical to SEQ ID NO: 14034
  source 1..80: mol_type = other DNA

SEQ ID NO: 74522 - DNA, 80 bp, synthetic construct; identical to SEQ ID NO: 40645
  source 1..80: mol_type = other DNA

SEQ ID NO: 74523 - DNA, 80 bp, synthetic construct; identical to SEQ ID NO: 40646
  source 1..80: mol_type = other DNA

SEQ ID NO: 74524 - DNA, 80 bp, synthetic construct; identical to SEQ ID NO: 40647
  source 1..80: mol_type = other DNA

SEQ ID NO: 74525 - DNA, 80 bp, synthetic construct; identical to SEQ ID NO: 14035
  source 1..80: mol_type = other DNA

SEQ ID NO: 74526 - DNA, 80 bp, synthetic construct; identical to SEQ ID NO: 40649
  source 1..80: mol_type = other DNA

SEQ ID NO: 74527 - DNA, 80 bp, synthetic construct; identical to SEQ ID NO: 14036
  source 1..80: mol_type = other DNA

SEQ ID NO: 74528 - DNA, 80 bp, synthetic construct; identical to SEQ ID NO: 40652
  source 1..80: mol_type = other DNA

SEQ ID NO: 74529 - DNA, 80 bp, synthetic construct; identical to SEQ ID NO: 40654
  source 1..80: mol_type = other DNA

SEQ ID NO: 74530 - DNA, 80 bp, synthetic construct; identical to SEQ ID NO: 40655
  source 1..80: mol_type = other DNA

SEQ ID NO: 74531 - DNA, 80 bp, synthetic construct; identical to SEQ ID NO: 14037
  source 1..80: mol_type = other DNA

SEQ ID NO: 74532 - DNA, 80 bp, synthetic construct; identical to SEQ ID NO: 40658
  source 1..80: mol_type = other DNA

SEQ ID NO: 74533 - DNA, 80 bp, synthetic construct; identical to SEQ ID NO: 14038
  source 1..80: mol_type = other DNA

SEQ ID NO: 74534 - DNA, 80 bp, synthetic construct; identical to SEQ ID NO: 40660
  source 1..80: mol_type = other DNA

SEQ ID NO: 74535 - DNA, 80 bp, synthetic construct; identical to SEQ ID NO: 40661
  source 1..80: mol_type = other DNA

SEQ ID NO: 74536 - DNA, 80 bp, synthetic construct; identical to SEQ ID NO: 40662
  source 1..80: mol_type = other DNA

SEQ ID NO: 74537 - DNA, 80 bp, synthetic construct; identical to SEQ ID NO: 14039
  source 1..80: mol_type = other DNA

SEQ ID NO: 74538 - DNA, 80 bp, synthetic construct; identical to SEQ ID NO: 40664
  source 1..80: mol_type = other DNA

SEQ ID NO: 74539 - DNA, 80 bp, synthetic construct; identical to SEQ ID NO: 40665
  source 1..80: mol_type = other DNA

SEQ ID NO: 74540 - DNA, 80 bp, synthetic construct; identical to SEQ ID NO: 40666
  source 1..80: mol_type = other DNA

SEQ ID NO: 74541 - DNA, 80 bp, synthetic construct; identical to SEQ ID NO: 40667
  source 1..80: mol_type = other DNA

SEQ ID NO: 74542 - DNA, 80 bp, synthetic construct; identical to SEQ ID NO: 14040
  source 1..80: mol_type = other DNA

SEQ ID NO: 74543 - DNA, 80 bp, synthetic construct; identical to SEQ ID NO: 40670
  source 1..80: mol_type = other DNA

SEQ ID NO: 74544 - DNA, 80 bp, synthetic construct; identical to SEQ ID NO: 40671
  source 1..80: mol_type = other DNA

SEQ ID NO: 74545 - DNA, 80 bp, synthetic construct; identical to SEQ ID NO: 40672
  source 1..80: mol_type = other DNA

SEQ ID NO: 74546 - DNA, 80 bp, synthetic construct; identical to SEQ ID NO: 14041
  source 1..80: mol_type = other DNA

SEQ ID NO: 74547 - DNA, 80 bp, synthetic construct; identical to SEQ ID NO: 40674
  source 1..80: mol_type = other DNA

SEQ ID NO: 74548 - DNA, 80 bp, synthetic construct; identical to SEQ ID NO: 40675
  source 1..80: mol_type = other DNA

SEQ ID NO: 74549 - DNA, 80 bp, synthetic construct; identical to SEQ ID NO: 14042
  source 1..80: mol_type = other DNA

SEQ ID NO: 74550 - DNA, 80 bp, synthetic construct; identical to SEQ ID NO: 40678
  source 1..80: mol_type = other DNA

SEQ ID NO: 74551 - DNA, 80 bp, synthetic construct; identical to SEQ ID NO: 40679
  source 1..80: mol_type = other DNA

SEQ ID NO: 74552 - DNA, 80 bp, synthetic construct; identical to SEQ ID NO: 40680
  source 1..80: mol_type = other DNA

SEQ ID NO: 74553 - DNA, 80 bp, synthetic construct; identical to SEQ ID NO: 14043
  source 1..80: mol_type = other DNA

SEQ ID NO: 74554 - DNA, 80 bp, synthetic construct; identical to SEQ ID NO: 40683
  source 1..80: mol_type = other DNA

SEQ ID NO: 74555 - DNA, 80 bp, synthetic construct; identical to SEQ ID NO: 40685
  source 1..80: mol_type = other DNA

SEQ ID NO: 74556 - DNA, 80 bp, synthetic construct; identical to SEQ ID NO: 40686
  source 1..80: mol_type = other DNA

SEQ ID NO: 74557 - DNA, 80 bp, synthetic construct; identical to SEQ ID NO: 40687
  source 1..80: mol_type = other DNA

SEQ ID NO: 74558 - DNA, 80 bp, synthetic construct; identical to SEQ ID NO: 40688
  source 1..80: mol_type = other DNA

SEQ ID NO: 74559 - DNA, 80 bp, synthetic construct; identical to SEQ ID NO: 14045
  source 1..80: mol_type = other DNA

SEQ ID NO: 74560 - DNA, 80 bp, synthetic construct; identical to SEQ ID NO: 40690
  source 1..80: mol_type = other DNA

SEQ ID NO: 74561 - DNA, 80 bp, synthetic construct; identical to SEQ ID NO: 40691
  source 1..80: mol_type = other DNA

SEQ ID NO: 74562 - DNA, 80 bp, synthetic construct; identical to SEQ ID NO: 40692
  source 1..80: mol_type = other DNA

SEQ ID NO: 74563 - DNA, 80 bp, synthetic construct; identical to SEQ ID NO: 14046
  source 1..80: mol_type = other DNA

SEQ ID NO: 74564 - DNA, 80 bp, synthetic construct; identical to SEQ ID NO: 40695
  source 1..80: mol_type = other DNA

SEQ ID NO: 74565 - DNA, 80 bp, synthetic construct; identical to SEQ ID NO: 40696
  source 1..80: mol_type = other DNA

SEQ ID NO: 74566 - DNA, 80 bp, synthetic construct; identical to SEQ ID NO: 14047
  source 1..80: mol_type = other DNA

SEQ ID NO: 74567 - DNA, 80 bp, synthetic construct; identical to SEQ ID NO: 40698
  source 1..80: mol_type = other DNA

SEQ ID NO: 74568 - DNA, 80 bp, synthetic construct; identical to SEQ ID NO: 40699
  source 1..80: mol_type = other DNA

SEQ ID NO: 74569 - DNA, 80 bp, synthetic construct; identical to SEQ ID NO: 40700
  source 1..80: mol_type = other DNA

SEQ ID NO: 74570 - DNA, 80 bp, synthetic construct; identical to SEQ ID NO: 14048
  source 1..80: mol_type = other DNA

SEQ ID NO: 74571 - DNA, 80 bp, synthetic construct; identical to SEQ ID NO: 40702
  source 1..80: mol_type = other DNA

SEQ ID NO: 74572 - DNA, 80 bp, synthetic construct; identical to SEQ ID NO: 40703
  source 1..80: mol_type = other DNA

SEQ ID NO: 74573 - DNA, 80 bp, synthetic construct; identical to SEQ ID NO: 14049
  source 1..80: mol_type = other DNA

SEQ ID NO: 74574 - DNA, 80 bp, synthetic construct; identical to SEQ ID NO: 40705
  source 1..80: mol_type = other DNA

SEQ ID NO: 74575 - DNA, 80 bp, synthetic construct; identical to SEQ ID NO: 40706
  source 1..80: mol_type = other DNA

SEQ ID NO: 74576 - DNA, 80 bp, synthetic construct; identical to SEQ ID NO: 40707
  source 1..80: mol_type = other DNA

SEQ ID NO: 74577 - DNA, 80 bp, synthetic construct; identical to SEQ ID NO: 40708
  source 1..80: mol_type = other DNA

SEQ ID NO: 74578 - DNA, 80 bp, synthetic construct; identical to SEQ ID NO: 14050
  source 1..80: mol_type = other DNA

SEQ ID NO: 74579 - DNA, 80 bp, synthetic construct; identical to SEQ ID NO: 40710
  source 1..80: mol_type = other DNA

SEQ ID NO: 74580 - DNA, 80 bp, synthetic construct; identical to SEQ ID NO: 40711
  source 1..80: mol_type = other DNA

SEQ ID NO: 74581 - DNA, 80 bp, synthetic construct; identical to SEQ ID NO: 40712
  source 1..80: mol_type = other DNA

SEQ ID NO: 74582 - DNA, 80 bp, synthetic construct; identical to SEQ ID NO: 14051
  source 1..80: mol_type = other DNA

SEQ ID NO: 74583 - DNA, 80 bp, synthetic construct; identical to SEQ ID NO: 40714
  source 1..80: mol_type = other DNA

SEQ ID NO: 74584 - DNA, 80 bp, synthetic construct; identical to SEQ ID NO: 40715
  source 1..80: mol_type = other DNA

SEQ ID NO: 74585 - DNA, 80 bp, synthetic construct; identical to SEQ ID NO: 14052
  source 1..80: mol_type = other DNA

SEQ ID NO: 74586 - DNA, 80 bp, synthetic construct; identical to SEQ ID NO: 40717
  source 1..80: mol_type = other DNA

SEQ ID NO: 74587 - DNA, 80 bp, synthetic construct; identical to SEQ ID NO: 40718
  source 1..80: mol_type = other DNA

SEQ ID NO: 74588 - DNA, 80 bp, synthetic construct; identical to SEQ ID NO: 40719
  source 1..80: mol_type = other DNA

SEQ ID NO: 74589 - DNA, 80 bp, synthetic construct; identical to SEQ ID NO: 14053
  source 1..80: mol_type = other DNA

SEQ ID NO: 74590 - DNA, 80 bp, synthetic construct; identical to SEQ ID NO: 40723
  source 1..80: mol_type = other DNA

SEQ ID NO: 74591 - DNA, 80 bp, synthetic construct; identical to SEQ ID NO: 14054
  source 1..80: mol_type = other DNA

SEQ ID NO: 74592 - DNA, 80 bp, synthetic construct; identical to SEQ ID NO: 40726
  source 1..80: mol_type = other DNA

SEQ ID NO: 74593 - DNA, 80 bp, synthetic construct; identical to SEQ ID NO: 40727
  source 1..80: mol_type = other DNA

SEQ ID NO: 74594 - DNA, 80 bp, synthetic construct; identical to SEQ ID NO: 40728
  source 1..80: mol_type = other DNA

SEQ ID NO: 74595 - DNA, 80 bp, synthetic construct; identical to SEQ ID NO: 14055
  source 1..80: mol_type = other DNA

SEQ ID NO: 74596 - DNA, 80 bp, synthetic construct; identical to SEQ ID NO: 40730
  source 1..80: mol_type = other DNA

SEQ ID NO: 74597 - DNA, 80 bp, synthetic construct; identical to SEQ ID NO: 40731
  source 1..80: mol_type = other DNA

SEQ ID NO: 74598 - DNA, 80 bp, synthetic construct; identical to SEQ ID NO: 40732
  source 1..80: mol_type = other DNA

SEQ ID NO: 74599 - DNA, 80 bp, synthetic construct; identical to SEQ ID NO: 40733
  source 1..80: mol_type = other DNA

SEQ ID NO: 74600 - DNA, 80 bp, synthetic construct; identical to SEQ ID NO: 14056
  source 1..80: mol_type = other DNA

SEQ ID NO: 74601 - DNA, 80 bp, synthetic construct; identical to SEQ ID NO: 40735
  source 1..80: mol_type = other DNA

SEQ ID NO: 74602 - DNA, 80 bp, synthetic construct; identical to SEQ ID NO: 40736
  source 1..80: mol_type = other DNA

SEQ ID NO: 74603 - DNA, 80 bp, synthetic construct; identical to SEQ ID NO: 40737
  source 1..80: mol_type = other DNA

SEQ ID NO: 74604 - DNA, 80 bp, synthetic construct; identical to SEQ ID NO: 14057
  source 1..80: mol_type = other DNA

SEQ ID NO: 74605 - DNA, 80 bp, synthetic construct; identical to SEQ ID NO: 40739
  source 1..80: mol_type = other DNA

SEQ ID NO: 74606 - DNA, 80 bp, synthetic construct; identical to SEQ ID NO: 40740
  source 1..80: mol_type = other DNA

SEQ ID NO: 74607 - DNA, 80 bp, synthetic construct; identical to SEQ ID NO: 40741
  source 1..80: mol_type = other DNA

SEQ ID NO: 74608 - DNA, 80 bp, synthetic construct; identical to SEQ ID NO: 14058
  source 1..80: mol_type = other DNA

SEQ ID NO: 74609 - DNA, 80 bp, synthetic construct; identical to SEQ ID NO: 40743
  source 1..80: mol_type = other DNA

SEQ ID NO: 74610 - DNA, 80 bp, synthetic construct; identical to SEQ ID NO: 40744
  source 1..80: mol_type = other DNA

SEQ ID NO: 74611 - DNA, 80 bp, synthetic construct; identical to SEQ ID NO: 40745
  source 1..80: mol_type = other DNA

SEQ ID NO: 74612 - DNA, 80 bp, synthetic construct; identical to SEQ ID NO: 14059
  source 1..80: mol_type = other DNA

SEQ ID NO: 74613 - DNA, 80 bp, synthetic construct; identical to SEQ ID NO: 40747
  source 1..80: mol_type = other DNA

SEQ ID NO: 74614 - DNA, 80 bp, synthetic construct; identical to SEQ ID NO: 40748
  source 1..80: mol_type = other DNA

SEQ ID NO: 74615 - DNA, 80 bp, synthetic construct; identical to SEQ ID NO: 14060
  source 1..80: mol_type = other DNA

SEQ ID NO: 74616 - DNA, 80 bp, synthetic construct; identical to SEQ ID NO: 40750
  source 1..80: mol_type = other DNA

SEQ ID NO: 74617 - DNA, 80 bp, synthetic construct; identical to SEQ ID NO: 40751
  source 1..80: mol_type = other DNA

SEQ ID NO: 74618 - DNA, 80 bp, synthetic construct; identical to SEQ ID NO: 40752
  source 1..80: mol_type = other DNA

SEQ ID NO: 74619 - DNA, 80 bp, synthetic construct; identical to SEQ ID NO: 14061
  source 1..80: mol_type = other DNA

SEQ ID NO: 74620 - DNA, 80 bp, synthetic construct; identical to SEQ ID NO: 40755
  source 1..80: mol_type = other DNA

SEQ ID NO: 74621 - DNA, 80 bp, synthetic construct; identical to SEQ ID NO: 40756
  source 1..80: mol_type = other DNA

SEQ ID NO: 74622 - DNA, 80 bp, synthetic construct; identical to SEQ ID NO: 14062
  source 1..80: mol_type = other DNA

SEQ ID NO: 74623 - DNA, 80 bp, synthetic construct; identical to SEQ ID NO: 40758
  source 1..80: mol_type = other DNA

SEQ ID NO: 74624 - DNA, 80 bp, synthetic construct; identical to SEQ ID NO: 40759
  source 1..80: mol_type = other DNA

SEQ ID NO: 74625 - DNA, 80 bp, synthetic construct; identical to SEQ ID NO: 14063
  source 1..80: mol_type = other DNA

SEQ ID NO: 74626 - DNA, 80 bp, synthetic construct; identical to SEQ ID NO: 40762
  source 1..80: mol_type = other DNA

SEQ ID NO: 74627 - DNA, 80 bp, synthetic construct; identical to SEQ ID NO: 40763
  source 1..80: mol_type = other DNA

SEQ ID NO: 74628 - DNA, 80 bp, synthetic construct; identical to SEQ ID NO: 40764
  source 1..80: mol_type = other DNA

SEQ ID NO: 74629 - DNA, 80 bp, synthetic construct; identical to SEQ ID NO: 14064
  source 1..80: mol_type = other DNA

SEQ ID NO: 74630 - DNA, 80 bp, synthetic construct; identical to SEQ ID NO: 40766
  source 1..80: mol_type = other DNA

SEQ ID NO: 74631 - DNA, 80 bp, synthetic construct; identical to SEQ ID NO: 40767
  source 1..80: mol_type = other DNA

SEQ ID NO: 74632 - DNA, 80 bp, synthetic construct; identical to SEQ ID NO: 40768
  source 1..80: mol_type = other DNA

SEQ ID NO: 74633 - DNA, 80 bp, synthetic construct; identical to SEQ ID NO: 14065
  source 1..80: mol_type = other DNA

SEQ ID NO: 74634 - DNA, 80 bp, synthetic construct; identical to SEQ ID NO: 40770
  source 1..80: mol_type = other DNA

SEQ ID NO: 74635 - DNA, 80 bp, synthetic construct; identical to SEQ ID NO: 40771
  source 1..80: mol_type = other DNA

SEQ ID NO: 74636 - DNA, 80 bp, synthetic construct; identical to SEQ ID NO: 40772
  source 1..80: mol_type = other DNA

SEQ ID NO: 74637 - DNA, 80 bp, synthetic construct; identical to SEQ ID NO: 40773
  source 1..80: mol_type = other DNA

SEQ ID NO: 74638 - DNA, 80 bp, synthetic construct; identical to SEQ ID NO: 14066
  source 1..80: mol_type = other DNA

SEQ ID NO: 74639 - DNA, 80 bp, synthetic construct; identical to SEQ ID NO: 40775
  source 1..80: mol_type = other DNA

SEQ ID NO: 74640 - DNA, 80 bp, synthetic construct; identical to SEQ ID NO: 40776
  source 1..80: mol_type = other DNA

SEQ ID NO: 74641 - DNA, 80 bp, synthetic construct; identical to SEQ ID NO: 14067
  source 1..80: mol_type = other DNA

SEQ ID NO: 74642 - DNA, 80 bp, synthetic construct; identical to SEQ ID NO: 40779
  source 1..80: mol_type = other DNA

SEQ ID NO: 74643 - DNA, 80 bp, synthetic construct; identical to SEQ ID NO: 40780
  source 1..80: mol_type = other DNA

SEQ ID NO: 74644 - DNA, 80 bp, synthetic construct; identical to SEQ ID NO: 14068
  source 1..80: mol_type = other DNA

SEQ ID NO: 74645 - DNA, 80 bp, synthetic construct; identical to SEQ ID NO: 40782
  source 1..80: mol_type = other DNA

SEQ ID NO: 74646 - DNA, 80 bp, synthetic construct; identical to SEQ ID NO: 40784
  source 1..80: mol_type = other DNA

SEQ ID NO: 74647 - DNA, 80 bp, synthetic construct; identical to SEQ ID NO: 14069
  source 1..80: mol_type = other DNA

SEQ ID NO: 74648 - DNA, 80 bp, synthetic construct; identical to SEQ ID NO: 40787
  source 1..80: mol_type = other DNA

SEQ ID NO: 74649 - DNA, 80 bp, synthetic construct; identical to SEQ ID NO: 40789
  source 1..80: mol_type = other DNA

SEQ ID NO: 74650 - DNA, 80 bp, synthetic construct; identical to SEQ ID NO: 14070
  source 1..80: mol_type = other DNA

SEQ ID NO: 74651 - DNA, 80 bp, synthetic construct; identical to SEQ ID NO: 40791
  source 1..80: mol_type = other DNA

SEQ ID NO: 74652 - DNA, 80 bp, synthetic construct; identical to SEQ ID NO: 40792
  source 1..80: mol_type = other DNA

SEQ ID NO: 74653 - DNA, 80 bp, synthetic construct; identical to SEQ ID NO: 40793
  source 1..80: mol_type = other DNA

SEQ ID NO: 74654 - DNA, 80 bp, synthetic construct; identical to SEQ ID NO: 40794
  source 1..80: mol_type = other DNA

SEQ ID NO: 74655 - DNA, 80 bp, synthetic construct; identical to SEQ ID NO: 14071
  source 1..80: mol_type = other DNA

SEQ ID NO: 74656 - DNA, 80 bp, synthetic construct; identical to SEQ ID NO: 40796
  source 1..80: mol_type = other DNA

SEQ ID NO: 74657 - DNA, 80 bp, synthetic construct; identical to SEQ ID NO: 40797
  source 1..80: mol_type = other DNA

SEQ ID NO: 74658 - DNA, 80 bp, synthetic construct; identical to SEQ ID NO: 40798
  source 1..80: mol_type = other DNA

SEQ ID NO: 74659 - DNA, 80 bp, synthetic construct; identical to SEQ ID NO: 14072
  source 1..80: mol_type = other DNA

SEQ ID NO: 74660 - DNA, 80 bp, synthetic construct; identical to SEQ ID NO: 40800
  source 1..80: mol_type = other DNA

SEQ ID NO: 74661 - DNA, 80 bp, synthetic construct; identical to SEQ ID NO: 40801
  source 1..80: mol_type = other DNA

SEQ ID NO: 74662 - DNA, 80 bp, synthetic construct; identical to SEQ ID NO: 40802
  source 1..80: mol_type = other DNA

SEQ ID NO: 74663 - DNA, 80 bp, synthetic construct; identical to SEQ ID NO: 14073
  source 1..80: mol_type = other DNA

SEQ ID NO: 74664 - DNA, 80 bp, synthetic construct; identical to SEQ ID NO: 40804
  source 1..80: mol_type = other DNA

SEQ ID NO: 74665 - DNA, 80 bp, synthetic construct; identical to SEQ ID NO: 40805
  source 1..80: mol_type = other DNA

SEQ ID NO: 74666 - DNA, 80 bp, synthetic construct; identical to SEQ ID NO: 14074
  source 1..80: mol_type = other DNA

SEQ ID NO: 74667 - DNA, 80 bp, synthetic construct; identical to SEQ ID NO: 40807
  source 1..80: mol_type = other DNA

SEQ ID NO: 74668 - DNA, 80 bp, synthetic construct; identical to SEQ ID NO: 40808
  source 1..80: mol_type = other DNA

SEQ ID NO: 74669 - DNA, 80 bp, synthetic construct; identical to SEQ ID NO: 40809
  source 1..80: mol_type = other DNA

SEQ ID NO: 74670 - DNA, 80 bp, synthetic construct; identical to SEQ ID NO: 40810
  source 1..80: mol_type = other DNA

SEQ ID NO: 74671 - DNA, 80 bp, synthetic construct; identical to SEQ ID NO: 40811
  source 1..80: mol_type = other DNA

SEQ ID NO: 74672 - DNA, 80 bp, synthetic construct; identical to SEQ ID NO: 14075
  source 1..80: mol_type = other DNA

SEQ ID NO: 74673 - DNA, 80 bp, synthetic construct; identical to SEQ ID NO: 40813
  source 1..80: mol_type = other DNA

SEQ ID NO: 74674 - DNA, 80 bp, synthetic construct; identical to SEQ ID NO: 14076
  source 1..80: mol_type = other DNA

SEQ ID NO: 74675 - DNA, 80 bp, synthetic construct; identical to SEQ ID NO: 40815
  source 1..80: mol_type = other DNA

SEQ ID NO: 74676 - DNA, 80 bp, synthetic construct; identical to SEQ ID NO: 40816
  source 1..80: mol_type = other DNA

SEQ ID NO: 74677 - DNA, 80 bp, synthetic construct; identical to SEQ ID NO: 40817
  source 1..80: mol_type = other DNA

SEQ ID NO: 74678 - DNA, 80 bp, synthetic construct; identical to SEQ ID NO: 14077
  source 1..80: mol_type = other DNA

SEQ ID NO: 74679 - DNA, 80 bp, synthetic construct; identical to SEQ ID NO: 40819
  source 1..80: mol_type = other DNA

SEQ ID NO: 74680 - DNA, 80 bp, synthetic construct; identical to SEQ ID NO: 40821
  source 1..80: mol_type = other DNA

SEQ ID NO: 74681 - DNA, 80 bp, synthetic construct; identical to SEQ ID NO: 14078
  source 1..80: mol_type = other DNA

SEQ ID NO: 74682 - DNA, 80 bp, synthetic construct; identical to SEQ ID NO: 40824
  source 1..80: mol_type = other DNA

SEQ ID NO: 74683 - DNA, 80 bp, synthetic construct; identical to SEQ ID NO: 40825
  source 1..80: mol_type = other DNA

SEQ ID NO: 74684 - DNA, 80 bp, synthetic construct; identical to SEQ ID NO: 14079
  source 1..80: mol_type = other DNA

SEQ ID NO: 74685 - DNA, 80 bp, synthetic construct; identical to SEQ ID NO: 40827
  source 1..80: mol_type = other DNA

SEQ ID NO: 74686 - DNA, 80 bp, synthetic construct; identical to SEQ ID NO: 40828
  source 1..80: mol_type = other DNA

SEQ ID NO: 74687 - DNA, 80 bp, synthetic construct; identical to SEQ ID NO: 40829
  source 1..80: mol_type = other DNA

SEQ ID NO: 74688 - DNA, 80 bp, synthetic construct; identical to SEQ ID NO: 14080
  source 1..80: mol_type = other DNA

SEQ ID NO: 74689 - DNA, 80 bp, synthetic construct; identical to SEQ ID NO: 40832
  source 1..80: mol_type = other DNA

SEQ ID NO: 74690 - DNA, 80 bp, synthetic construct; identical to SEQ ID NO: 40833
  source 1..80: mol_type = other DNA

SEQ ID NO: 74691 - DNA, 80 bp, synthetic construct; identical to SEQ ID NO: 14081
  source 1..80: mol_type = other DNA

SEQ ID NO: 74692 - DNA, 80 bp, synthetic construct; identical to SEQ ID NO: 40835
  source 1..80: mol_type = other DNA

SEQ ID NO: 74693 - DNA, 80 bp, synthetic construct; identical to SEQ ID NO: 40836
  source 1..80: mol_type = other DNA

SEQ ID NO: 74694 - DNA, 80 bp, synthetic construct; identical to SEQ ID NO: 40837
  source 1..80: mol_type = other DNA

SEQ ID NO: 74695 - DNA, 80 bp, synthetic construct; identical to SEQ ID NO: 40838
  source 1..80: mol_type = other DNA

SEQ ID NO: 74696 - DNA, 80 bp, synthetic construct; identical to SEQ ID NO: 40839
  source 1..80: mol_type = other DNA

SEQ ID NO: 74697 - DNA, 80 bp, synthetic construct; identical to SEQ ID NO: 14082
  source 1..80: mol_type = other DNA

SEQ ID NO: 74698 - DNA, 80 bp, synthetic construct; identical to SEQ ID NO: 40842
  source 1..80: mol_type = other DNA

SEQ ID NO: 74699 - DNA, 80 bp, synthetic construct; identical to SEQ ID NO: 14083
  source 1..80: mol_type = other DNA

SEQ ID NO: 74700 - DNA, 80 bp, synthetic construct; identical to SEQ ID NO: 40844
  source 1..80: mol_type = other DNA

SEQ ID NO: 74701 - DNA, 80 bp, synthetic construct; identical to SEQ ID NO: 40845
  source 1..80: mol_type = other DNA

SEQ ID NO: 74702 - DNA, 80 bp, synthetic construct; identical to SEQ ID NO: 40846
  source 1..80: mol_type = other DNA

SEQ ID NO: 74703 - DNA, 80 bp, synthetic construct; identical to SEQ ID NO: 14084
  source 1..80: mol_type = other DNA

SEQ ID NO: 74704 - DNA, 80 bp, synthetic construct; identical to SEQ ID NO: 40849
  source 1..80: mol_type = other DNA

SEQ ID NO: 74705 - DNA, 80 bp, synthetic construct; identical to SEQ ID NO: 14085
  source 1..80: mol_type = other DNA

SEQ ID NO: 74706 - DNA, 80 bp, synthetic construct; identical to SEQ ID NO: 40852
  source 1..80: mol_type = other DNA

SEQ ID NO: 74707 - DNA, 80 bp, synthetic construct; identical to SEQ ID NO: 40853
  source 1..80: mol_type = other DNA

SEQ ID NO: 74708 - DNA, 80 bp, synthetic construct; identical to SEQ ID NO: 40854
  source 1..80: mol_type = other DNA

SEQ ID NO: 74709 - DNA, 80 bp, synthetic construct; identical to SEQ ID NO: 14086
  source 1..80: mol_type = other DNA

SEQ ID NO: 74710 - DNA, 80 bp, synthetic construct; identical to SEQ ID NO: 40856
  source 1..80: mol_type = other DNA

SEQ ID NO: 74711 - DNA, 80 bp, synthetic construct; identical to SEQ ID NO: 40857
  source 1..80: mol_type = other DNA

SEQ ID NO: 74712 - DNA, 80 bp, synthetic construct; identical to SEQ ID NO: 40858
  source 1..80: mol_type = other DNA

SEQ ID NO: 74713 - DNA, 80 bp, synthetic construct; identical to SEQ ID NO: 40859
  source 1..80: mol_type = other DNA

SEQ ID NO: 74714 - DNA, 80 bp, synthetic construct; identical to SEQ ID NO: 14087
  source 1..80: mol_type = other DNA

SEQ ID NO: 74715 - DNA, 80 bp, synthetic construct; identical to SEQ ID NO: 40861
  source 1..80: mol_type = other DNA

SEQ ID NO: 74716 - DNA, 80 bp, synthetic construct; identical to SEQ ID NO: 40862
  source 1..80: mol_type = other DNA

SEQ ID NO: 74717 - DNA, 80 bp, synthetic construct; identical to SEQ ID NO: 40863
  source 1..80: mol_type = other DNA

SEQ ID NO: 74718 - DNA, 80 bp, synthetic construct; identical to SEQ ID NO: 14088
  source 1..80: mol_type = other DNA

SEQ ID NO: 74719 - DNA, 80 bp, synthetic construct; identical to SEQ ID NO: 40866
  source 1..80: mol_type = other DNA

SEQ ID NO: 74720 - DNA, 80 bp, synthetic construct; identical to SEQ ID NO: 40867
  source 1..80: mol_type = other DNA

SEQ ID NO: 74721 - DNA, 80 bp, synthetic construct; identical to SEQ ID NO: 14089
  source 1..80: mol_type = other DNA

SEQ ID NO: 74722 - DNA, 80 bp, synthetic construct; identical to SEQ ID NO: 40869
  source 1..80: mol_type = other DNA

SEQ ID NO: 74723 - DNA, 80 bp, synthetic construct; identical to SEQ ID NO: 40870
  source 1..80: mol_type = other DNA

SEQ ID NO: 74724 - DNA, 80 bp, synthetic construct; identical to SEQ ID NO: 14090
  source 1..80: mol_type = other DNA

SEQ ID NO: 74725 - DNA, 80 bp, synthetic construct; identical to SEQ ID NO: 40873
  source 1..80: mol_type = other DNA

SEQ ID NO: 74726 - DNA, 80 bp, synthetic construct; identical to SEQ ID NO: 40874
  source 1..80: mol_type = other DNA

SEQ ID NO: 74727 - DNA, 80 bp, synthetic construct; identical to SEQ ID NO: 40875
  source 1..80: mol_type = other DNA

SEQ ID NO: 74728 - DNA, 80 bp, synthetic construct; identical to SEQ ID NO: 14091
  source 1..80: mol_type = other DNA

SEQ ID NO: 74729 - DNA, 80 bp, synthetic construct; identical to SEQ ID NO: 40877
  source 1..80: mol_type = other DNA

SEQ ID NO: 74730 - DNA, 80 bp, synthetic construct; identical to SEQ ID NO: 40878
  source 1..80: mol_type = other DNA

SEQ ID NO: 74731 - DNA, 80 bp, synthetic construct; identical to SEQ ID NO: 40879
  source 1..80: mol_type = other DNA

SEQ ID NO: 74732 - DNA, 80 bp, synthetic construct; identical to SEQ ID NO: 14092
  source 1..80: mol_type = other DNA

SEQ ID NO: 74733 - DNA, 80 bp, synthetic construct; identical to SEQ ID NO: 40881
  source 1..80: mol_type = other DNA

SEQ ID NO: 74734 - DNA, 80 bp, synthetic construct; identical to SEQ ID NO: 40882
  source 1..80: mol_type = other DNA

SEQ ID NO: 74735 - DNA, 80 bp, synthetic construct; identical to SEQ ID NO: 40883
  source 1..80: mol_type = other DNA

SEQ ID NO: 74736 - DNA, 80 bp, synthetic construct; identical to SEQ ID NO: 40884
  source 1..80: mol_type = other DNA

SEQ ID NO: 74737 - DNA, 80 bp, synthetic construct; identical to SEQ ID NO: 14093
  source 1..80: mol_type = other DNA

SEQ ID NO: 74738 - DNA, 80 bp, synthetic construct; identical to SEQ ID NO: 40886
  source 1..80: mol_type = other DNA

SEQ ID NO: 74739 - DNA, 80 bp, synthetic construct; identical to SEQ ID NO: 40887
  source 1..80: mol_type = other DNA

SEQ ID NO: 74740 - DNA, 80 bp, synthetic construct; identical to SEQ ID NO: 40888
  source 1..80: mol_type = other DNA

SEQ ID NO: 74741 - DNA, 80 bp, synthetic construct; identical to SEQ ID NO: 14094
  source 1..80: mol_type = other DNA

SEQ ID NO: 74742 - DNA, 80 bp, synthetic construct; identical to SEQ ID NO: 40890
  source 1..80: mol_type = other DNA

SEQ ID NO: 74743 - DNA, 80 bp, synthetic construct; identical to SEQ ID NO: 40891
  source 1..80: mol_type = other DNA

SEQ ID NO: 74744 - DNA, 80 bp, synthetic construct; identical to SEQ ID NO: 40892
  source 1..80: mol_type = other DNA

SEQ ID NO: 74745 - DNA, 80 bp, synthetic construct; identical to SEQ ID NO: 14095
  source 1..80: mol_type = other DNA

SEQ ID NO: 74746 - DNA, 80 bp, synthetic construct; identical to SEQ ID NO: 40894
  source 1..80: mol_type = other DNA

SEQ ID NO: 74747 - DNA, 80 bp, synthetic construct; identical to SEQ ID NO: 40895
  source 1..80: mol_type = other DNA

SEQ ID NO: 74748 - DNA, 80 bp, synthetic construct; identical to SEQ ID NO: 14096
  source 1..80: mol_type = other DNA

SEQ ID NO: 74749 - DNA, 80 bp, synthetic construct; identical to SEQ ID NO: 40898
  source 1..80: mol_type = other DNA

SEQ ID NO: 74750 - DNA, 80 bp, synthetic construct; identical to SEQ ID NO: 40899
  source 1..80: mol_type = other DNA

SEQ ID NO: 74751 - DNA, 80 bp, synthetic construct; identical to SEQ ID NO: 40900
  source 1..80: mol_type = other DNA

SEQ ID NO: 74752 - DNA, 80 bp, synthetic construct; identical to SEQ ID NO: 14097
  source 1..80: mol_type = other DNA

SEQ ID NO: 74753 - DNA, 80 bp, synthetic construct; identical to SEQ ID NO: 40902
  source 1..80: mol_type = other DNA

SEQ ID NO: 74754 - DNA, 80 bp, synthetic construct; identical to SEQ ID NO: 40903
  source 1..80: mol_type = other DNA

SEQ ID NO: 74755 - DNA, 80 bp, synthetic construct; identical to SEQ ID NO: 40904
  source 1..80: mol_type = other DNA

SEQ ID NO: 74756 - DNA, 80 bp, synthetic construct; identical to SEQ ID NO: 14098
  source 1..80: mol_type = other DNA

SEQ ID NO: 74757 - DNA, 80 bp, synthetic construct; identical to SEQ ID NO: 40906
  source 1..80: mol_type = other DNA

SEQ ID NO: 74758 - DNA, 80 bp, synthetic construct; identical to SEQ ID NO: 40907
  source 1..80: mol_type = other DNA

SEQ ID NO: 74759 - DNA, 80 bp, synthetic construct; identical to SEQ ID NO: 14099
  source 1..80: mol_type = other DNA

SEQ ID NO: 74760 - DNA, 80 bp, synthetic construct; identical to SEQ ID NO: 40909
  source 1..80: mol_type = other DNA

SEQ ID NO: 74761 - DNA, 80 bp, synthetic construct; identical to SEQ ID NO: 40911
  source 1..80: mol_type = other DNA

SEQ ID NO: 74762 - DNA, 80 bp, synthetic construct; identical to SEQ ID NO: 14100
  source 1..80: mol_type = other DNA

SEQ ID NO: 74763 - DNA, 80 bp, synthetic construct; identical to SEQ ID NO: 40913
  source 1..80: mol_type = other DNA

SEQ ID NO: 74764 - DNA, 80 bp, synthetic construct; identical to SEQ ID NO: 40914
  source 1..80: mol_type = other DNA

SEQ ID NO: 74765 - DNA, 80 bp, synthetic construct; identical to SEQ ID NO: 40915
  source 1..80: mol_type = other DNA

SEQ ID NO: 74766 - DNA, 80 bp, synthetic construct; identical to SEQ ID NO: 14101
  source 1..80: mol_type = other DNA

SEQ ID NO: 74767 - DNA, 80 bp, synthetic construct; identical to SEQ ID NO: 40918
  source 1..80: mol_type = other DNA

SEQ ID NO: 74768 - DNA, 80 bp, synthetic construct; identical to SEQ ID NO: 40919
  source 1..80: mol_type = other DNA

SEQ ID NO: 74769 - DNA, 80 bp, synthetic construct; identical to SEQ ID NO: 14102
  source 1..80: mol_type = other DNA

SEQ ID NO: 74770 - DNA, 80 bp, synthetic construct; identical to SEQ ID NO: 40921
  source 1..80: mol_type = other DNA

SEQ ID NO: 74771 - DNA, 80 bp, synthetic construct; identical to SEQ ID NO: 40922
  source 1..80: mol_type = other DNA

SEQ ID NO: 74772 - DNA, 80 bp, synthetic construct; identical to SEQ ID NO: 40923
  source 1..80: mol_type = other DNA

SEQ ID NO: 74773 - DNA, 80 bp, synthetic construct; identical to SEQ ID NO: 14103
  source 1..80: mol_type = other DNA

SEQ ID NO: 74774 - DNA, 80 bp, synthetic construct; identical to SEQ ID NO: 40925
  source 1..80: mol_type = other DNA

SEQ ID NO: 74775 - DNA, 80 bp, synthetic construct; identical to SEQ ID NO: 40926
  source 1..80: mol_type = other DNA

SEQ ID NO: 74776 - DNA, 80 bp, synthetic construct; identical to SEQ ID NO: 40927
  source 1..80: mol_type = other DNA

SEQ ID NO: 74777 - DNA, 80 bp, synthetic construct; identical to SEQ ID NO: 40928
  source 1..80: mol_type = other DNA

SEQ ID NO: 74778 - DNA, 80 bp, synthetic construct; identical to SEQ ID NO: 14104
  source 1..80: mol_type = other DNA

SEQ ID NO: 74779 - DNA, 80 bp, synthetic construct; identical to SEQ ID NO: 40930
  source 1..80: mol_type = other DNA

SEQ ID NO: 74780 - DNA, 80 bp, synthetic construct; identical to SEQ ID NO: 14105
  source 1..80: mol_type = other DNA

SEQ ID NO: 74781 - DNA, 80 bp, synthetic construct; identical to SEQ ID NO: 40934
  source 1..80: mol_type = other DNA

SEQ ID NO: 74782 - DNA, 80 bp, synthetic construct; identical to SEQ ID NO: 40936
  source 1..80: mol_type = other DNA

SEQ ID NO: 74783 - DNA, 80 bp, synthetic construct; identical to SEQ ID NO: 14106
  source 1..80: mol_type = other DNA

SEQ ID NO: 74784 - DNA, 80 bp, synthetic construct; identical to SEQ ID NO: 40938
  source 1..80: mol_type = other DNA

SEQ ID NO: 74785 - DNA, 80 bp, synthetic construct; identical to SEQ ID NO: 40939
  source 1..80: mol_type = other DNA

SEQ ID NO: 74786 - DNA, 80 bp, synthetic construct; identical to SEQ ID NO: 14107
  source 1..80: mol_type = other DNA

SEQ ID NO: 74787 - DNA, 80 bp, synthetic construct; identical to SEQ ID NO: 40941
  source 1..80: mol_type = other DNA

SEQ ID NO: 74788 - DNA, 80 bp, synthetic construct; identical to SEQ ID NO: 40942
  source 1..80: mol_type = other DNA

SEQ ID NO: 74789 - DNA, 80 bp, synthetic construct; identical to SEQ ID NO: 40943
  source 1..80: mol_type = other DNA

SEQ ID NO: 74790 - DNA, 80 bp, synthetic construct; identical to SEQ ID NO: 40944
  source 1..80: mol_type = other DNA

SEQ ID NO: 74791 - DNA, 80 bp, synthetic construct; identical to SEQ ID NO: 14108
  source 1..80: mol_type = other DNA

SEQ ID NO: 74792 - DNA, 80 bp, synthetic construct; identical to SEQ ID NO: 40946
  source 1..80: mol_type = other DNA

SEQ ID NO: 74793 - DNA, 80 bp, synthetic construct; identical to SEQ ID NO: 14109
  source 1..80: mol_type = other DNA

SEQ ID NO: 74794 - DNA, 80 bp, synthetic construct; identical to SEQ ID NO: 40949
  source 1..80: mol_type = other DNA

SEQ ID NO: 74795 - DNA, 80 bp, synthetic construct; identical to SEQ ID NO: 40950
  source 1..80: mol_type = other DNA

SEQ ID NO: 74796 - DNA, 80 bp, synthetic construct; identical to SEQ ID NO: 40951
  source 1..80: mol_type = other DNA

SEQ ID NO: 74797 - DNA, 80 bp, synthetic construct; identical to SEQ ID NO: 14110
  source 1..80: mol_type = other DNA

SEQ ID NO: 74798 - DNA, 80 bp, synthetic construct; identical to SEQ ID NO: 40953
  source 1..80: mol_type = other DNA

SEQ ID NO: 74799 - DNA, 80 bp, synthetic construct; identical to SEQ ID NO: 40954
  source 1..80: mol_type = other DNA

SEQ ID NO: 74800 - DNA, 80 bp, synthetic construct; identical to SEQ ID NO: 40955
  source 1..80: mol_type = other DNA

SEQ ID NO: 74801 - DNA, 80 bp, synthetic construct; identical to SEQ ID NO: 14111
  source 1..80: mol_type = other DNA

SEQ ID NO: 74802 - DNA, 80 bp, synthetic construct; identical to SEQ ID NO: 40958
  source 1..80: mol_type = other DNA

SEQ ID NO: 74803 - DNA, 80 bp, synthetic construct; identical to SEQ ID NO: 40960
  source 1..80: mol_type = other DNA

SEQ ID NO: 74804 - DNA, 80 bp, synthetic construct; identical to SEQ ID NO: 14112
  source 1..80: mol_type = other DNA

SEQ ID NO: 74805 - DNA, 80 bp, synthetic construct; identical to SEQ ID NO: 40962
  source 1..80: mol_type = other DNA

SEQ ID NO: 74806 - DNA, 80 bp, synthetic construct; identical to SEQ ID NO: 40963
  source 1..80: mol_type = other DNA

SEQ ID NO: 74807 - DNA, 80 bp, synthetic construct; identical to SEQ ID NO: 40964
  source 1..80: mol_type = other DNA

SEQ ID NO: 74808 - DNA, 80 bp, synthetic construct; identical to SEQ ID NO: 14113
  source 1..80: mol_type = other DNA

SEQ ID NO: 74809 - DNA, 80 bp, synthetic construct; identical to SEQ ID NO: 40966
  source 1..80: mol_type = other DNA

SEQ ID NO: 74810 - DNA, 80 bp, synthetic construct; identical to SEQ ID NO: 40967
  source 1..80: mol_type = other DNA

SEQ ID NO: 74811 - DNA, 80 bp, synthetic construct; identical to SEQ ID NO: 14114
  source 1..80: mol_type = other DNA

SEQ ID NO: 74812 - DNA, 80 bp, synthetic construct; identical to SEQ ID NO: 40969
  source 1..80: mol_type = other DNA

SEQ ID NO: 74813 - DNA, 80 bp, synthetic construct; identical to SEQ ID NO: 40970
  source 1..80: mol_type = other DNA

SEQ ID NO: 74814 - DNA, 80 bp, synthetic construct; identical to SEQ ID NO: 40971
  source 1..80: mol_type = other DNA

SEQ ID NO: 74815 - DNA, 80 bp, synthetic construct; identical to SEQ ID NO: 40972
  source 1..80: mol_type = other DNA

SEQ ID NO: 74816 - DNA, 80 bp, synthetic construct; identical to SEQ ID NO: 14115
  source 1..80: mol_type = other DNA

SEQ ID NO: 74817 - DNA, 80 bp, synthetic construct; identical to SEQ ID NO: 40975
  source 1..80: mol_type = other DNA

SEQ ID NO: 74818 - DNA, 80 bp, synthetic construct; identical to SEQ ID NO: 14116
  source 1..80: mol_type = other DNA

SEQ ID NO: 74819 - DNA, 80 bp, synthetic construct; identical to SEQ ID NO: 40978
  source 1..80: mol_type = other DNA

SEQ ID NO: 74820 - DNA, 80 bp, synthetic construct; identical to SEQ ID NO: 40979
  source 1..80: mol_type = other DNA

SEQ ID NO: 74821 - DNA, 80 bp, synthetic construct; identical to SEQ ID NO: 40980
  source 1..80: mol_type = other DNA

SEQ ID NO: 74822 - DNA, 80 bp, synthetic construct; identical to SEQ ID NO: 14117
  source 1..80: mol_type = other DNA

SEQ ID NO: 74823 - DNA, 80 bp, synthetic construct; identical to SEQ ID NO: 40982
  source 1..80: mol_type = other DNA

SEQ ID NO: 74824 - DNA, 80 bp, synthetic construct; identical to SEQ ID NO: 40983
  source 1..80: mol_type = other DNA

SEQ ID NO: 74825 - DNA, 80 bp, synthetic construct; identical to SEQ ID NO: 14118
  source 1..80: mol_type = other DNA

SEQ ID NO: 74826 - DNA, 80 bp, synthetic construct; identical to SEQ ID NO: 40985
  source 1..80: mol_type = other DNA

SEQ ID NO: 74827 - DNA, 80 bp, synthetic construct; identical to SEQ ID NO: 40986
  source 1..80: mol_type = other DNA

SEQ ID NO: 74828 - DNA, 80 bp, synthetic construct; identical to SEQ ID NO: 40987
  source 1..80: mol_type = other DNA

SEQ ID NO: 74829 - DNA, 80 bp, synthetic construct; identical to SEQ ID NO: 40988
  source 1..80: mol_type = other DNA

SEQ ID NO: 74830 - DNA, 80 bp, synthetic construct; identical to SEQ ID NO: 14119
  source 1..80: mol_type = other DNA

SEQ ID NO: 74831 - DNA, 80 bp, synthetic construct; identical to SEQ ID NO: 40990
  source 1..80: mol_type = other DNA

SEQ ID NO: 74832 - DNA, 80 bp, synthetic construct; identical to SEQ ID NO: 40991
  source 1..80: mol_type = other DNA

SEQ ID NO: 74833 - DNA, 80 bp, synthetic construct; identical to SEQ ID NO: 14120
  source 1..80: mol_type = other DNA

SEQ ID NO: 74834 - DNA, 80 bp, synthetic construct; identical to SEQ ID NO: 40993
  source 1..80: mol_type = other DNA

SEQ ID NO: 74835 - DNA, 80 bp, synthetic construct; identical to SEQ ID NO: 40994
  source 1..80: mol_type = other DNA

SEQ ID NO: 74836 - DNA, 80 bp, synthetic construct; identical to SEQ ID NO: 40995
  source 1..80: mol_type = other DNA

SEQ ID NO: 74837 - DNA, 80 bp, synthetic construct; identical to SEQ ID NO: 14121
  source 1..80: mol_type = other DNA

SEQ ID NO: 74838 - DNA, 80 bp, synthetic construct; identical to SEQ ID NO: 40997
  source 1..80: mol_type = other DNA

SEQ ID NO: 74839 - DNA, 80 bp, synthetic construct; identical to SEQ ID NO: 40998
  source 1..80: mol_type = other DNA

SEQ ID NO: 74840 - DNA, 80 bp, synthetic construct; identical to SEQ ID NO: 14122
  source 1..80: mol_type = other DNA

SEQ ID NO: 74841 - DNA, 80 bp, synthetic construct; identical to SEQ ID NO: 41001
  source 1..80: mol_type = other DNA

SEQ ID NO: 74842 - DNA, 80 bp, synthetic construct; identical to SEQ ID NO: 41002
  source 1..80: mol_type = other DNA

SEQ ID NO: 74843 - DNA, 80 bp, synthetic construct; identical to SEQ ID NO: 41003
  source 1..80: mol_type = other DNA

SEQ ID NO: 74844 - DNA, 80 bp, synthetic construct; identical to SEQ ID NO: 14123
  source 1..80: mol_type = other DNA

SEQ ID NO: 74845 - DNA, 80 bp, synthetic construct; identical to SEQ ID NO: 41005
  source 1..80: mol_type = other DNA

SEQ ID NO: 74846 - DNA, 80 bp, synthetic construct; identical to SEQ ID NO: 41006
  source 1..80: mol_type = other DNA

SEQ ID NO: 74847 - DNA, 80 bp, synthetic construct; identical to SEQ ID NO: 41007
  source 1..80: mol_type = other DNA

SEQ ID NO: 74848 - DNA, 80 bp, synthetic construct; identical to SEQ ID NO: 41008
  source 1..80: mol_type = other DNA

SEQ ID NO: 74849 - DNA, 80 bp, synthetic construct; identical to SEQ ID NO: 14124
  source 1..80: mol_type = other DNA

SEQ ID NO: 74850 - DNA, 80 bp, synthetic construct; identical to SEQ ID NO: 41010
  source 1..80: mol_type = other DNA

SEQ ID NO: 74851 - DNA, 80 bp, synthetic construct; identical to SEQ ID NO: 41012
  source 1..80: mol_type = other DNA

SEQ ID NO: 74852 - DNA, 80 bp, synthetic construct; identical to SEQ ID NO: 14125
  source 1..80: mol_type = other DNA

SEQ ID NO: 74853 - DNA, 80 bp, synthetic construct; identical to SEQ ID NO: 41014
  source 1..80: mol_type = other DNA

SEQ ID NO: 74854 - DNA, 80 bp, synthetic construct; identical to SEQ ID NO: 41015
  source 1..80: mol_type = other DNA

SEQ ID NO: 74855 - DNA, 80 bp, synthetic construct; identical to SEQ ID NO: 41016
  source 1..80: mol_type = other DNA

SEQ ID NO: 74856 - DNA, 80 bp, synthetic construct; identical to SEQ ID NO: 14126
  source 1..80: mol_type = other DNA

SEQ ID NO: 74857 - DNA, 80 bp, synthetic construct; identical to SEQ ID NO: 41019
  source 1..80: mol_type = other DNA

SEQ ID NO: 74858 - DNA, 80 bp, synthetic construct; identical to SEQ ID NO: 14127
  source 1..80: mol_type = other DNA

SEQ ID NO: 74859 - DNA, 80 bp, synthetic construct; identical to SEQ ID NO: 41021
  source 1..80: mol_type = other DNA

SEQ ID NO: 74860 - DNA, 80 bp, synthetic construct; identical to SEQ ID NO: 41023
  source 1..80: mol_type = other DNA

SEQ ID NO: 74861 - DNA, 80 bp, synthetic construct; identical to SEQ ID NO: 41025
  source 1..80: mol_type = other DNA

SEQ ID NO: 74862 - DNA, 80 bp, synthetic construct; identical to SEQ ID NO: 41027
  source 1..80: mol_type = other DNA

SEQ ID NO: 74863 - DNA, 80 bp, synthetic construct; identical to SEQ ID NO: 14129
  source 1..80: mol_type = other DNA

SEQ ID NO: 74864 - DNA, 80 bp, synthetic construct; identical to SEQ ID NO: 41030
  source 1..80: mol_type = other DNA

SEQ ID NO: 74865 - DNA, 80 bp, synthetic construct; identical to SEQ ID NO: 41031
  source 1..80: mol_type = other DNA

SEQ ID NO: 74866 - DNA, 80 bp, synthetic construct; identical to SEQ ID NO: 14130
  source 1..80: mol_type = other DNA

SEQ ID NO: 74867 - DNA, 80 bp, synthetic construct; identical to SEQ ID NO: 41034
  source 1..80: mol_type = other DNA

SEQ ID NO: 74868 - DNA, 80 bp, synthetic construct; identical to SEQ ID NO: 41035
  source 1..80: mol_type = other DNA

SEQ ID NO: 74869 - DNA, 80 bp, synthetic construct; identical to SEQ ID NO: 14131
  source 1..80: mol_type = other DNA

SEQ ID NO: 74870 - DNA, 80 bp, synthetic construct; identical to SEQ ID NO: 41038
  source 1..80: mol_type = other DNA

SEQ ID NO: 74871 - DNA, 80 bp, synthetic construct; identical to SEQ ID NO: 41040
  source 1..80: mol_type = other DNA

SEQ ID NO: 74872 - DNA, 80 bp, synthetic construct; identical to SEQ ID NO: 14132
  source 1..80: mol_type = other DNA

SEQ ID NO: 74873 - DNA, 80 bp, synthetic construct; identical to SEQ ID NO: 41042
  source 1..80: mol_type = other DNA

SEQ ID NO: 74874 - DNA, 80 bp, synthetic construct; identical to SEQ ID NO: 41043
  source 1..80: mol_type = other DNA

SEQ ID NO: 74875 - DNA, 80 bp, synthetic construct; identical to SEQ ID NO: 41044
  source 1..80: mol_type = other DNA

SEQ ID NO: 74876 - DNA, 80 bp, synthetic construct; identical to SEQ ID NO: 14133
  source 1..80: mol_type = other DNA

SEQ ID NO: 74877 - DNA, 80 bp, synthetic construct; identical to SEQ ID NO: 41046
  source 1..80: mol_type = other DNA

SEQ ID NO: 74878 - DNA, 80 bp, synthetic construct; identical to SEQ ID NO: 41047
  source 1..80: mol_type = other DNA

SEQ ID NO: 74879 - DNA, 80 bp, synthetic construct; identical to SEQ ID NO: 41048
  source 1..80: mol_type = other DNA

SEQ ID NO: 74880 - DNA, 80 bp, synthetic construct; identical to SEQ ID NO: 14134
  source 1..80: mol_type = other DNA

SEQ ID NO: 74881 - DNA, 80 bp, synthetic construct; identical to SEQ ID NO: 41050
  source 1..80: mol_type = other DNA

SEQ ID NO: 74882 - DNA, 80 bp, synthetic construct; identical to SEQ ID NO: 41051
  source 1..80: mol_type = other DNA

SEQ ID NO: 74883 - DNA, 80 bp, synthetic construct; identical to SEQ ID NO: 14135
  source 1..80: mol_type = other DNA

SEQ ID NO: 74884 - DNA, 80 bp, synthetic construct; identical to SEQ ID NO: 41053
  source 1..80: mol_type = other DNA

SEQ ID NO: 74885 - DNA, 80 bp, synthetic construct; identical to SEQ ID NO: 41055
  source 1..80: mol_type = other DNA

SEQ ID NO: 74886 - DNA, 80 bp, synthetic construct; identical to SEQ ID NO: 41056
  source 1..80: mol_type = other DNA

SEQ ID NO: 74887 - DNA, 80 bp, synthetic construct; identical to SEQ ID NO: 14136
  source 1..80: mol_type = other DNA

SEQ ID NO: 74888 - DNA, 80 bp, synthetic construct; identical to SEQ ID NO: 41058
  source 1..80: mol_type = other DNA

SEQ ID NO: 74889 - DNA, 80 bp, synthetic construct; identical to SEQ ID NO: 41059
  source 1..80: mol_type = other DNA

SEQ ID NO: 74890 - DNA, 80 bp, synthetic construct; identical to SEQ ID NO: 14137
  source 1..80: mol_type = other DNA

SEQ ID NO: 74891 - DNA, 80 bp, synthetic construct; identical to SEQ ID NO: 41061
  source 1..80: mol_type = other DNA

SEQ ID NO: 74892 - DNA, 80 bp, synthetic construct; identical to SEQ ID NO: 41062
  source 1..80: mol_type = other DNA

SEQ ID NO: 74893 - DNA, 80 bp, synthetic construct; identical to SEQ ID NO: 41063
  source 1..80: mol_type = other DNA

SEQ ID NO: 74894 - DNA, 80 bp, synthetic construct; identical to SEQ ID NO: 14138
  source 1..80: mol_type = other DNA

SEQ ID NO: 74895 - DNA, 80 bp, synthetic construct; identical to SEQ ID NO: 41066
  source 1..80: mol_type = other DNA

SEQ ID NO: 74896 - DNA, 80 bp, synthetic construct; identical to SEQ ID NO: 41067
  source 1..80: mol_type = other DNA

SEQ ID NO: 74897 - DNA, 80 bp, synthetic construct; identical to SEQ ID NO: 41068
  source 1..80: mol_type = other DNA

SEQ ID NO: 74898 - DNA, 80 bp, synthetic construct; identical to SEQ ID NO: 14139
  source 1..80: mol_type = other DNA

SEQ ID NO: 74899 - DNA, 80 bp, synthetic construct; identical to SEQ ID NO: 41070
  source 1..80: mol_type = other DNA

SEQ ID NO: 74900 - DNA, 80 bp, synthetic construct; identical to SEQ ID NO: 41071
  source 1..80: mol_type = other DNA

SEQ ID NO: 74901 - DNA, 80 bp, synthetic construct; identical to SEQ ID NO: 14140
  source 1..80: mol_type = other DNA

SEQ ID NO: 74902 - DNA, 80 bp, synthetic construct; identical to SEQ ID NO: 41073
  source 1..80: mol_type = other DNA

SEQ ID NO: 74903 - DNA, 80 bp, synthetic construct; identical to SEQ ID NO: 41074
  source 1..80: mol_type = other DNA

SEQ ID NO: 74904 - DNA, 80 bp, synthetic construct; identical to SEQ ID NO: 41075
  source 1..80: mol_type = other DNA

SEQ ID NO: 74905 - DNA, 80 bp, synthetic construct; identical to SEQ ID NO: 14141
  source 1..80: mol_type = other DNA

SEQ ID NO: 74906 - DNA, 80 bp, synthetic construct; identical to SEQ ID NO: 41078
  source 1..80: mol_type = other DNA

SEQ ID NO: 74907 - DNA, 80 bp, synthetic construct; identical to SEQ ID NO: 41079
  source 1..80: mol_type = other DNA

SEQ ID NO: 74908 - DNA, 80 bp, synthetic construct; identical to SEQ ID NO: 41080
  source 1..80: mol_type = other DNA

SEQ ID NO: 74909 - DNA, 80 bp, synthetic construct; identical to SEQ ID NO: 14142
  source 1..80: mol_type = other DNA

SEQ ID NO: 74910 - DNA, 80 bp, synthetic construct; identical to SEQ ID NO: 41082
  source 1..80: mol_type = other DNA

SEQ ID NO: 74911 - DNA, 80 bp, synthetic construct; identical to SEQ ID NO: 41084
  source 1..80: mol_type = other DNA

SEQ ID NO: 74912 - DNA, 80 bp, synthetic construct; identical to SEQ ID NO: 14143
  source 1..80: mol_type = other DNA

SEQ ID NO: 74913 - DNA, 80 bp, synthetic construct; identical to SEQ ID NO: 41086
  source 1..80: mol_type = other DNA

SEQ ID NO: 74914 - DNA, 80 bp, synthetic construct; identical to SEQ ID NO: 41087
  source 1..80: mol_type = other DNA

SEQ ID NO: 74915 - DNA, 80 bp, synthetic construct; identical to SEQ ID NO: 14144
  source 1..80: mol_type = other DNA

SEQ ID NO: 74916 - DNA, 80 bp, synthetic construct; identical to SEQ ID NO: 41089
  source 1..80: mol_type = other DNA

SEQ ID NO: 74917 - DNA, 80 bp, synthetic construct; identical to SEQ ID NO: 41090
  source 1..80: mol_type = other DNA

SEQ ID NO: 74918 - DNA, 80 bp, synthetic construct; identical to SEQ ID NO: 41091
  source 1..80: mol_type = other DNA

SEQ ID NO: 74919 - DNA, 80 bp, synthetic construct; identical to SEQ ID NO: 41092
  source 1..80: mol_type = other DNA

SEQ ID NO: 74920 - DNA, 80 bp, synthetic construct; identical to SEQ ID NO: 14145
  source 1..80: mol_type = other DNA

SEQ ID NO: 74921 - DNA, 80 bp, synthetic construct; identical to SEQ ID NO: 14146
  source 1..80: mol_type = other DNA

SEQ ID NO: 74922 - DNA, 80 bp, synthetic construct; identical to SEQ ID NO: 41097
  source 1..80: mol_type = other DNA

SEQ ID NO: 74923 - DNA, 80 bp, synthetic construct; identical to SEQ ID NO: 41098
  source 1..80: mol_type = other DNA

SEQ ID NO: 74924 - DNA, 80 bp, synthetic construct; identical to SEQ ID NO: 41099
  source 1..80: mol_type = other DNA

SEQ ID NO: 74925 - DNA, 80 bp, synthetic construct; identical to SEQ ID NO: 14147
  source 1..80: mol_type = other DNA

SEQ ID NO: 74926 - DNA, 80 bp, synthetic construct; identical to SEQ ID NO: 41101
  source 1..80: mol_type = other DNA

SEQ ID NO: 74927 - DNA, 80 bp, synthetic construct; identical to SEQ ID NO: 41102
  source 1..80: mol_type = other DNA

SEQ ID NO: 74928 - DNA, 80 bp, synthetic construct; identical to SEQ ID NO: 41103
  source 1..80: mol_type = other DNA

SEQ ID NO: 74929 - DNA, 80 bp, synthetic construct; identical to SEQ ID NO: 41104
  source 1..80: mol_type = other DNA

SEQ ID NO: 74930 - DNA, 80 bp, synthetic construct; identical to SEQ ID NO: 14148
  source 1..80: mol_type = other DNA

SEQ ID NO: 74931 - DNA, 80 bp, synthetic construct; identical to SEQ ID NO: 41106
  source 1..80: mol_type = other DNA

SEQ ID NO: 74932 - DNA, 80 bp, synthetic construct; identical to SEQ ID NO: 14149
  source 1..80: mol_type = other DNA

SEQ ID NO: 74933 - DNA, 80 bp, synthetic construct; identical to SEQ ID NO: 41109
  source 1..80: mol_type = other DNA

SEQ ID NO: 74934 - DNA, 80 bp, synthetic construct; identical to SEQ ID NO: 41110
  source 1..80: mol_type = other DNA

SEQ ID NO: 74935 - DNA, 80 bp, synthetic construct; identical to SEQ ID NO: 41111
  source 1..80: mol_type = other DNA

SEQ ID NO: 74936 - DNA, 80 bp, synthetic construct; identical to SEQ ID NO: 14150
  source 1..80: mol_type = other DNA

SEQ ID NO: 74937 - DNA, 80 bp, synthetic construct; identical to SEQ ID NO: 41113
  source 1..80: mol_type = other DNA

SEQ ID NO: 74938 - DNA, 80 bp, synthetic construct; identical to SEQ ID NO: 41114
  source 1..80: mol_type = other DNA

SEQ ID NO: 74939 - DNA, 80 bp, synthetic construct; identical to SEQ ID NO: 41116
  source 1..80: mol_type = other DNA

SEQ ID NO: 74940 - DNA, 80 bp, synthetic construct; identical to SEQ ID NO: 14151
  source 1..80: mol_type = other DNA

SEQ ID NO: 74941 - DNA, 80 bp, synthetic construct; identical to SEQ ID NO: 41118
  source 1..80: mol_type = other DNA

SEQ ID NO: 74942 - DNA, 80 bp, synthetic construct; identical to SEQ ID NO: 41119
  source 1..80: mol_type = other DNA

SEQ ID NO: 74943 - DNA, 80 bp, synthetic construct; identical to SEQ ID NO: 14152
  source 1..80: mol_type = other DNA

SEQ ID NO: 74944 - DNA, 80 bp, synthetic construct; identical to SEQ ID NO: 41121
  source 1..80: mol_type = other DNA

SEQ ID NO: 74945 - DNA, 80 bp, synthetic construct; identical to SEQ ID NO: 41122
  source 1..80: mol_type = other DNA

SEQ ID NO: 74946 - DNA, 80 bp, synthetic construct; identical to SEQ ID NO: 41123
  source 1..80: mol_type = other DNA

SEQ ID NO: 74947 - DNA, 80 bp, synthetic construct; identical to SEQ ID NO: 41124
  source 1..80: mol_type = other DNA

SEQ ID NO: 74948 - DNA, 80 bp, synthetic construct; identical to SEQ ID NO: 14153
  source 1..80: mol_type = other DNA

SEQ ID NO: 74949 - DNA, 80 bp, synthetic construct; identical to SEQ ID NO: 41126
  source 1..80: mol_type = other DNA

SEQ ID NO: 74950 - DNA, 80 bp, synthetic construct; identical to SEQ ID NO: 41127
  source 1..80: mol_type = other DNA

SEQ ID NO: 74951 - DNA, 80 bp, synthetic construct; identical to SEQ ID NO: 14154
  source 1..80: mol_type = other DNA

SEQ ID NO: 74952 - DNA, 80 bp, synthetic construct; identical to SEQ ID NO: 41129
  source 1..80: mol_type = other DNA

SEQ ID NO: 74953 - DNA, 80 bp, synthetic construct; identical to SEQ ID NO: 41130
  source 1..80: mol_type = other DNA

SEQ ID NO: 74954 - DNA, 80 bp, synthetic construct; identical to SEQ ID NO: 41131
  source 1..80: mol_type = other DNA

SEQ ID NO: 74955 - DNA, 80 bp, synthetic construct; identical to SEQ ID NO: 41132
  source 1..80: mol_type = other DNA

SEQ ID NO: 74956 - DNA, 80 bp, synthetic construct; identical to SEQ ID NO: 14155
  source 1..80: mol_type = other DNA

SEQ ID NO: 74957 - DNA, 80 bp, synthetic construct; identical to SEQ ID NO: 41134
  source 1..80: mol_type = other DNA

SEQ ID NO: 74958 - DNA, 80 bp, synthetic construct; identical to SEQ ID NO: 41135
  source 1..80: mol_type = other DNA

SEQ ID NO: 74959 - DNA, 80 bp, synthetic construct; identical to SEQ ID NO: 14156
  source 1..80: mol_type = other DNA

SEQ ID NO: 74960 - DNA, 80 bp, synthetic construct; identical to SEQ ID NO: 41137
  source 1..80: mol_type = other DNA

SEQ ID NO: 74961 - DNA, 80 bp, synthetic construct; identical to SEQ ID NO: 41138
  source 1..80: mol_type = other DNA

SEQ ID NO: 74962 - DNA, 80 bp, synthetic construct; identical to SEQ ID NO: 41139
  source 1..80: mol_type = other DNA

SEQ ID NO: 74963 - DNA, 80 bp, synthetic construct; identical to SEQ ID NO: 14157
  source 1..80: mol_type = other DNA

SEQ ID NO: 74964 - DNA, 80 bp, synthetic construct; identical to SEQ ID NO: 41141
  source 1..80: mol_type = other DNA

SEQ ID NO: 74965 - DNA, 80 bp, synthetic construct; identical to SEQ ID NO: 41142
  source 1..80: mol_type = other DNA

SEQ ID NO: 74966 - DNA, 80 bp, synthetic construct; identical to SEQ ID NO: 41143
  source 1..80: mol_type = other DNA

SEQ ID NO: 74967 - DNA, 80 bp, synthetic construct; identical to SEQ ID NO: 41144
  source 1..80: mol_type = other DNA

SEQ ID NO: 74968 - DNA, 80 bp, synthetic construct; identical to SEQ ID NO: 14158
  source 1..80: mol_type = other DNA

SEQ ID NO: 74969 - DNA, 80 bp, synthetic construct; identical to SEQ ID NO: 41146
  source 1..80: mol_type = other DNA

SEQ ID NO: 74970 - DNA, 80 bp, synthetic construct; identical to SEQ ID NO: 41147
  source 1..80: mol_type = other DNA

SEQ ID NO: 74971 - DNA, 80 bp, synthetic construct; identical to SEQ ID NO: 14159
  source 1..80: mol_type = other DNA

SEQ ID NO: 74972 - DNA, 80 bp, synthetic construct; identical to SEQ ID NO: 41149
  source 1..80: mol_type = other DNA

SEQ ID NO: 74973 - DNA, 80 bp, synthetic construct; identical to SEQ ID NO: 41150
  source 1..80: mol_type = other DNA

SEQ ID NO: 74974 - DNA, 80 bp, synthetic construct; identical to SEQ ID NO: 41151
  source 1..80: mol_type = other DNA

SEQ ID NO: 74975 - DNA, 80 bp, synthetic construct; identical to SEQ ID NO: 14160
  source 1..80: mol_type = other DNA

SEQ ID NO: 74976 - DNA, 80 bp, synthetic construct; identical to SEQ ID NO: 41153
  source 1..80: mol_type = other DNA

SEQ ID NO: 74977 - DNA, 80 bp, synthetic construct; identical to SEQ ID NO: 41154
  source 1..80: mol_type = other DNA

SEQ ID NO: 74978 - DNA, 80 bp, synthetic construct; identical to SEQ ID NO: 41155
  source 1..80: mol_type = other DNA

SEQ ID NO: 74979 - DNA, 80 bp, synthetic construct; identical to SEQ ID NO: 14161
  source 1..80: mol_type = other DNA

SEQ ID NO: 74980 - DNA, 80 bp, synthetic construct; identical to SEQ ID NO: 41158
  source 1..80: mol_type = other DNA

SEQ ID NO: 74981 - DNA, 80 bp, synthetic construct; identical to SEQ ID NO: 41159
  source 1..80: mol_type = other DNA

SEQ ID NO: 74982 - DNA, 80 bp, synthetic construct; identical to SEQ ID NO: 14162
  source 1..80: mol_type = other DNA

SEQ ID NO: 74983 - DNA, 80 bp, synthetic construct; identical to SEQ ID NO: 41161
  source 1..80: mol_type = other DNA

SEQ ID NO: 74984 - DNA, 80 bp, synthetic construct; identical to SEQ ID NO: 41162
  source 1..80: mol_type = other DNA

SEQ ID NO: 74985 - DNA, 80 bp, synthetic construct; identical to SEQ ID NO: 41163
  source 1..80: mol_type = other DNA

SEQ ID NO: 74986 - DNA, 80 bp, synthetic construct; identical to SEQ ID NO: 41164
  source 1..80: mol_type = other DNA

SEQ ID NO: 74987 - DNA, 80 bp, synthetic construct; identical to SEQ ID NO: 14163
  source 1..80: mol_type = other DNA

SEQ ID NO: 74988 - DNA, 80 bp, synthetic construct; identical to SEQ ID NO: 41166
  source 1..80: mol_type = other DNA

SEQ ID NO: 74989 - DNA, 80 bp, synthetic construct; identical to SEQ ID NO: 41167
  source 1..80: mol_type = other DNA

SEQ ID NO: 74990 - DNA, 80 bp, synthetic construct; identical to SEQ ID NO: 41168
  source 1..80: mol_type = other DNA

SEQ ID NO: 74991 - DNA, 80 bp, synthetic construct; identical to SEQ ID NO: 14164
  source 1..80: mol_type = other DNA

SEQ ID NO: 74992 - DNA, 80 bp, synthetic construct; identical to SEQ ID NO: 41170
  source 1..80: mol_type = other DNA

SEQ ID NO: 74993 - DNA, 80 bp, synthetic construct; identical to SEQ ID NO: 41171
  source 1..80: mol_type = other DNA

SEQ ID NO: 74994 - DNA, 80 bp, synthetic construct; identical to SEQ ID NO: 41172
  source 1..80: mol_type = other DNA

SEQ ID NO: 74995 - DNA, 80 bp, synthetic construct; identical to SEQ ID NO: 14165
  source 1..80: mol_type = other DNA

SEQ ID NO: 74996 - DNA, 80 bp, synthetic construct; identical to SEQ ID NO: 41174
  source 1..80: mol_type = other DNA

SEQ ID NO: 74997 - DNA, 80 bp, synthetic construct; identical to SEQ ID NO: 41175
  source 1..80: mol_type = other DNA

SEQ ID NO: 74998 - DNA, 80 bp, synthetic construct; identical to SEQ ID NO: 14166
  source 1..80: mol_type = other DNA

SEQ ID NO: 74999 - DNA, 80 bp, synthetic construct; identical to SEQ ID NO: 41178
  source 1..80: mol_type = other DNA

SEQ ID NO: 75000 - DNA, 80 bp, synthetic construct; identical to SEQ ID NO: 41179
  source 1..80: mol_type = other DNA

SEQ ID NO: 75001 - DNA, 80 bp, synthetic construct; identical to SEQ ID NO: 41180
  source 1..80: mol_type = other DNA

SEQ ID NO: 75002 - DNA, 80 bp, synthetic construct; identical to SEQ ID NO: 14167
  source 1..80: mol_type = other DNA

SEQ ID NO: 75003 - DNA, 80 bp, synthetic construct; identical to SEQ ID NO: 41182
  source 1..80: mol_type = other DNA

SEQ ID NO: 75004 - DNA, 80 bp, synthetic construct; identical to SEQ ID NO: 41183
  source 1..80: mol_type = other DNA

SEQ ID NO: 75005 - DNA, 80 bp, synthetic construct; identical to SEQ ID NO: 14168
  source 1..80: mol_type = other DNA

SEQ ID NO: 75006 - DNA, 80 bp, synthetic construct; identical to SEQ ID NO: 41185
  source 1..80: mol_type = other DNA

SEQ ID NO: 75007 - DNA, 80 bp, synthetic construct; identical to SEQ ID NO: 41186
  source 1..80: mol_type = other DNA

SEQ ID NO: 75008 - DNA, 80 bp, synthetic construct; identical to SEQ ID NO: 41187
  source 1..80: mol_type = other DNA

SEQ ID NO: 75009 - DNA, 80 bp, synthetic construct; identical to SEQ ID NO: 41188
  source 1..80: mol_type = other DNA

SEQ ID NO: 75010 - DNA, 80 bp, synthetic construct; identical to SEQ ID NO: 14169
  source 1..80: mol_type = other DNA

SEQ ID NO: 75011 - DNA, 80 bp, synthetic construct; identical to SEQ ID NO: 41190
  source 1..80: mol_type = other DNA

SEQ ID NO: 75012 - DNA, 80 bp, synthetic construct; identical to SEQ ID NO: 41191
  source 1..80: mol_type = other DNA

SEQ ID NO: 75013 - DNA, 80 bp, synthetic construct; identical to SEQ ID NO: 14170
  source 1..80: mol_type = other DNA

SEQ ID NO: 75014 - DNA, 80 bp, synthetic construct; identical to SEQ ID NO: 41193
  source 1..80: mol_type = other DNA

SEQ ID NO: 75015 - DNA, 80 bp, synthetic construct; identical to SEQ ID NO: 41194
  source 1..80: mol_type = other DNA

SEQ ID NO: 75016 - DNA, 80 bp, synthetic construct; identical to SEQ ID NO: 14171
  source 1..80: mol_type = other DNA

SEQ ID NO: 75017 - DNA, 80 bp, synthetic construct; identical to SEQ ID NO: 41197
  source 1..80: mol_type = other DNA

SEQ ID NO: 75018 - DNA, 80 bp, synthetic construct; identical to SEQ ID NO: 41199
  source 1..80: mol_type = other DNA

SEQ ID NO: 75019 - DNA, 80 bp, synthetic construct; identical to SEQ ID NO: 41200
  source 1..80: mol_type = other DNA

SEQ ID NO: 75020 - DNA, 80 bp, synthetic construct; identical to SEQ ID NO: 14172
  source 1..80: mol_type = other DNA

SEQ ID NO: 75021 - DNA, 80 bp, synthetic construct; identical to SEQ ID NO: 41202
  source 1..80: mol_type = other DNA

SEQ ID NO: 75022 - DNA, 80 bp, synthetic construct; identical to SEQ ID NO: 41203
  source 1..80: mol_type = other DNA

SEQ ID NO: 75023 - DNA, 80 bp, synthetic construct; identical to SEQ ID NO: 14173
  source 1..80: mol_type = other DNA

SEQ ID NO: 75024 - DNA, 80 bp, synthetic construct; identical to SEQ ID NO: 41205
  source 1..80: mol_type = other DNA

SEQ ID NO: 75025 - DNA, 80 bp, synthetic construct; identical to SEQ ID NO: 41206
  source 1..80: mol_type = other DNA

SEQ ID NO: 75026 - DNA, 80 bp, synthetic construct; identical to SEQ ID NO: 41207
  source 1..80: mol_type = other DNA

SEQ ID NO: 75027 - DNA, 80 bp, synthetic construct; identical to SEQ ID NO: 14174
  source 1..80: mol_type = other DNA

SEQ ID NO: 75028 - DNA, 80 bp, synthetic construct; identical to SEQ ID NO: 41209
  source 1..80: mol_type = other DNA

SEQ ID NO: 75029 - DNA, 80 bp, synthetic construct; identical to SEQ ID NO: 41210
  source 1..80: mol_type = other DNA

SEQ ID NO: 75030 - DNA, 80 bp, synthetic construct; identical to SEQ ID NO: 41211
  source 1..80: mol_type = other DNA

SEQ ID NO: 75031 - DNA, 80 bp, synthetic construct; identical to SEQ ID NO: 14175
  source 1..80: mol_type = other DNA

SEQ ID NO: 75032 - DNA, 80 bp, synthetic construct; identical to SEQ ID NO: 41213
  source 1..80: mol_type = other DNA

SEQ ID NO: 75033 - DNA, 80 bp, synthetic construct; identical to SEQ ID NO: 41214
  source 1..80: mol_type = other DNA

SEQ ID NO: 75034 - DNA, 80 bp, synthetic construct; identical to SEQ ID NO: 41215
  source 1..80: mol_type = other DNA

SEQ ID NO: 75035 - DNA, 80 bp, synthetic construct; identical to SEQ ID NO: 41216
  source 1..80: mol_type = other DNA

SEQ ID NO: 75036 - DNA, 80 bp, synthetic construct; identical to SEQ ID NO: 14176
  source 1..80: mol_type = other DNA

SEQ ID NO: 75037 - DNA, 80 bp, synthetic construct; identical to SEQ ID NO: 41219
  source 1..80: mol_type = other DNA

SEQ ID NO: 75038 - DNA, 80 bp, synthetic construct; identical to SEQ ID NO: 41220
  source 1..80: mol_type = other DNA

SEQ ID NO: 75039 - DNA, 80 bp, synthetic construct; identical to SEQ ID NO: 14177
  source 1..80: mol_type = other DNA

SEQ ID NO: 75040 - DNA, 80 bp, synthetic construct; identical to SEQ ID NO: 41222
  source 1..80: mol_type = other DNA

SEQ ID NO: 75041 - DNA, 80 bp, synthetic construct; identical to SEQ ID NO: 41223
  source 1..80: mol_type = other DNA

SEQ ID NO: 75042 - DNA, 80 bp, synthetic construct; identical to SEQ ID NO: 14178
  source 1..80: mol_type = other DNA

SEQ ID NO: 75043 - DNA, 80 bp, synthetic construct; identical to SEQ ID NO: 41225
  source 1..80: mol_type = other DNA

SEQ ID NO: 75044 - DNA, 80 bp, synthetic construct; identical to SEQ ID NO: 41226
  source 1..80: mol_type = other DNA

SEQ ID NO: 75045 - DNA, 80 bp, synthetic construct; identical to SEQ ID NO: 41227
  source 1..80: mol_type = other DNA

SEQ ID NO: 75046 - DNA, 80 bp, synthetic construct; identical to SEQ ID NO: 14179
  source 1..80: mol_type = other DNA

SEQ ID NO: 75047 - DNA, 80 bp, synthetic construct; identical to SEQ ID NO: 41229
  source 1..80: mol_type = other DNA

SEQ ID NO: 75048 - DNA, 80 bp, synthetic construct; identical to SEQ ID NO: 41230
  source 1..80: mol_type = other DNA

SEQ ID NO: 75049 - DNA, 80 bp, synthetic construct; identical to SEQ ID NO: 41231
  source 1..80: mol_type = other DNA

SEQ ID NO: 75050 - DNA, 80 bp, synthetic construct; identical to SEQ ID NO: 41232
  source 1..80: mol_type = other DNA

SEQ ID NO: 75051 - DNA, 80 bp, synthetic construct; identical to SEQ ID NO: 14180
  source 1..80: mol_type = other DNA

SEQ ID NO: 75052 - DNA, 80 bp, synthetic construct; identical to SEQ ID NO: 41234
  source 1..80: mol_type = other DNA

SEQ ID NO: 75053 - DNA, 80 bp, synthetic construct; identical to SEQ ID NO: 41235
  source 1..80: mol_type = other DNA

SEQ ID NO: 75054 - DNA, 80 bp, synthetic construct; identical to SEQ ID NO: 14181
  source 1..80: mol_type = other DNA

SEQ ID NO: 75055 - DNA, 80 bp, synthetic construct; identical to SEQ ID NO: 41237
  source 1..80: mol_type = other DNA

SEQ ID NO: 75056 - DNA, 80 bp, synthetic construct; identical to SEQ ID NO: 41238
  source 1..80: mol_type = other DNA

SEQ ID NO: 75057 - DNA, 80 bp, synthetic construct; identical to SEQ ID NO: 41239
  source 1..80: mol_type = other DNA

SEQ ID NO: 75058 - DNA, 80 bp, synthetic construct; identical to SEQ ID NO: 14182
  source 1..80: mol_type = other DNA

SEQ ID NO: 75059 - DNA, 80 bp, synthetic construct; identical to SEQ ID NO: 41241
  source 1..80: mol_type = other DNA

SEQ ID NO: 75060 - DNA, 80 bp, synthetic construct; identical to SEQ ID NO: 41242
  source 1..80: mol_type = other DNA

SEQ ID NO: 75061 - DNA, 80 bp, synthetic construct; identical to SEQ ID NO: 41243
  source 1..80: mol_type = other DNA

SEQ ID NO: 75062 - DNA, 80 bp, synthetic construct; identical to SEQ ID NO: 41244
  source 1..80: mol_type = other DNA

SEQ ID NO: 75063 - DNA, 80 bp, synthetic construct; identical to SEQ ID NO: 14183
  source 1..80: mol_type = other DNA

SEQ ID NO: 75064 - DNA, 80 bp, synthetic construct; identical to SEQ ID NO: 41246
  source 1..80: mol_type = other DNA

SEQ ID NO: 75065 - DNA, 80 bp, synthetic construct; identical to SEQ ID NO: 41247
  source 1..80: mol_type = other DNA

SEQ ID NO: 75066 - DNA, 80 bp, synthetic construct; identical to SEQ ID NO: 14184
  source 1..80: mol_type = other DNA

SEQ ID NO: 75067 - DNA, 80 bp, synthetic construct; identical to SEQ ID NO: 41250
  source 1..80: mol_type = other DNA

SEQ ID NO: 75068 - DNA, 80 bp, synthetic construct; identical to SEQ ID NO: 41251
  source 1..80: mol_type = other DNA

SEQ ID NO: 75069 - DNA, 80 bp, synthetic construct; identical to SEQ ID NO: 41252
  source 1..80: mol_type = other DNA

SEQ ID NO: 75070 - DNA, 80 bp, synthetic construct; identical to SEQ ID NO: 14185
  source 1..80: mol_type = other DNA

SEQ ID NO: 75071 - DNA, 80 bp, synthetic construct; identical to SEQ ID NO: 41254
  source 1..80: mol_type = other DNA

SEQ ID NO: 75072 - DNA, 80 bp, synthetic construct; identical to SEQ ID NO: 41255
  source 1..80: mol_type = other DNA

SEQ ID NO: 75073 - DNA, 80 bp, synthetic construct; identical to SEQ ID NO: 41256
  source 1..80: mol_type = other DNA

SEQ ID NO: 75074 - DNA, 80 bp, synthetic construct; identical to SEQ ID NO: 14186
  source 1..80: mol_type = other DNA

SEQ ID NO: 75075 - DNA, 80 bp, synthetic construct; identical to SEQ ID NO: 41258
  source 1..80: mol_type = other DNA

SEQ ID NO: 75076 - DNA, 80 bp, synthetic construct; identical to SEQ ID NO: 41259
  source 1..80: mol_type = other DNA

SEQ ID NO: 75077 - DNA, 80 bp, synthetic construct; identical to SEQ ID NO: 14187
  source 1..80: mol_type = other DNA

SEQ ID NO: 75078 - DNA, 80 bp, synthetic construct; identical to SEQ ID NO: 41261
  source 1..80: mol_type = other DNA

SEQ ID NO: 75079 - DNA, 80 bp, synthetic construct; identical to SEQ ID NO: 41262
  source 1..80: mol_type = other DNA

SEQ ID NO: 75080 - DNA, 80 bp, synthetic construct; identical to SEQ ID NO: 41263
  source 1..80: mol_type = other DNA

SEQ ID NO: 75081 - DNA, 80 bp, synthetic construct; identical to SEQ ID NO: 41264
  source 1..80: mol_type = other DNA

SEQ ID NO: 75082 - DNA, 80 bp, synthetic construct; identical to SEQ ID NO: 14188
  source 1..80: mol_type = other DNA

SEQ ID NO: 75083 - DNA, 80 bp, synthetic construct; identical to SEQ ID NO: 41266
  source 1..80: mol_type = other DNA

SEQ ID NO: 75084 - DNA, 80 bp, synthetic construct; identical to SEQ ID NO: 41267
  source 1..80: mol_type = other DNA

SEQ ID NO: 75085 - DNA, 80 bp, synthetic construct; identical to SEQ ID NO: 14189
  source 1..80: mol_type = other DNA

SEQ ID NO: 75086 - DNA, 80 bp, synthetic construct; identical to SEQ ID NO: 41269
  source 1..80: mol_type = other DNA

SEQ ID NO: 75087 - DNA, 80 bp, synthetic construct; identical to SEQ ID NO: 41270
  source 1..80: mol_type = other DNA

SEQ ID NO: 75088 - DNA, 80 bp, synthetic construct; identical to SEQ ID NO: 41271
  source 1..80: mol_type = other DNA

SEQ ID NO: 75089 - DNA, 80 bp, synthetic construct; identical to SEQ ID NO: 41272
  source 1..80: mol_type = other DNA

SEQ ID NO: 75090 - DNA, 80 bp, synthetic construct; identical to SEQ ID NO: 14190
  source 1..80: mol_type = other DNA

SEQ ID NO: 75091 - DNA, 80 bp, synthetic construct; identical to SEQ ID NO: 41274
  source 1..80: mol_type = other DNA

SEQ ID NO: 75092 - DNA, 80 bp, synthetic construct; identical to SEQ ID NO: 41275
  source 1..80: mol_type = other DNA

SEQ ID NO: 75093 - DNA, 80 bp, synthetic construct; identical to SEQ ID NO: 14191
  source 1..80: mol_type = other DNA

SEQ ID NO: 75094 - DNA, 80 bp, synthetic construct; identical to SEQ ID NO: 41277
  source 1..80: mol_type = other DNA

SEQ ID NO: 75095 - DNA, 80 bp, synthetic construct; identical to SEQ ID NO: 41278
  source 1..80: mol_type = other DNA

SEQ ID NO: 75096 - DNA, 80 bp, synthetic construct; identical to SEQ ID NO: 41279
  source 1..80: mol_type = other DNA

SEQ ID NO: 75097 - DNA, 80 bp, synthetic construct; identical to SEQ ID NO: 41280
  source 1..80: mol_type = other DNA

SEQ ID NO: 75098 - DNA, 80 bp, synthetic construct; identical to SEQ ID NO: 14192
  source 1..80: mol_type = other DNA

SEQ ID NO: 75099 - DNA, 80 bp, synthetic construct; identical to SEQ ID NO: 41282
  source 1..80: mol_type = other DNA

SEQ ID NO: 75100 - DNA, 80 bp, synthetic construct; identical to SEQ ID NO: 41283
  source 1..80: mol_type = other DNA

SEQ ID NO: 75101 - DNA, 80 bp, synthetic construct; identical to SEQ ID NO: 14193
  source 1..80: mol_type = other DNA

SEQ ID NO: 75102 - DNA, 80 bp, synthetic construct; identical to SEQ ID NO: 41285
  source 1..80: mol_type = other DNA

SEQ ID NO: 75103 - DNA, 80 bp, synthetic construct; identical to SEQ ID NO: 41286
  source 1..80: mol_type = other DNA

SEQ ID NO: 75104 - DNA, 80 bp, synthetic construct; identical to SEQ ID NO: 41287
  source 1..80: mol_type = other DNA

SEQ ID NO: 75105 - DNA, 80 bp, synthetic construct; identical to SEQ ID NO: 14194
  source 1..80: mol_type = other DNA

SEQ ID NO: 75106 - DNA, 80 bp, synthetic construct; identical to SEQ ID NO: 41289
  source 1..80: mol_type = other DNA

SEQ ID NO: 75107 - DNA, 80 bp, synthetic construct; identical to SEQ ID NO: 41290
  source 1..80: mol_type = other DNA

SEQ ID NO: 75108 - DNA, 80 bp, synthetic construct; identical to SEQ ID NO: 41291
  source 1..80: mol_type = other DNA

SEQ ID NO: 75109 - DNA, 80 bp, synthetic construct; identical to SEQ ID NO: 14195
  source 1..80: mol_type = other DNA

SEQ ID NO: 75110 - DNA, 80 bp, synthetic construct; identical to SEQ ID NO: 41293
  source 1..80: mol_type = other DNA

SEQ ID NO: 75111 - DNA, 80 bp, synthetic construct; identical to SEQ ID NO: 41294
  source 1..80: mol_type = other DNA

SEQ ID NO: 75112 - DNA, 80 bp, synthetic construct; identical to SEQ ID NO: 41295
  source 1..80: mol_type = other DNA

SEQ ID NO: 75113 - DNA, 80 bp, synthetic construct; identical to SEQ ID NO: 14196
  source 1..80: mol_type = other DNA

SEQ ID NO: 75114 - DNA, 80 bp, synthetic construct; identical to SEQ ID NO: 41297
  source 1..80: mol_type = other DNA

SEQ ID NO: 75115 - DNA, 80 bp, synthetic construct; identical to SEQ ID NO: 41298
  source 1..80: mol_type = other DNA

SEQ ID NO: 75116 - DNA, 80 bp, synthetic construct; identical to SEQ ID NO: 41299
  source 1..80: mol_type = other DNA

SEQ ID NO: 75117 - DNA, 80 bp, synthetic construct; identical to SEQ ID NO: 14197
  source 1..80: mol_type = other DNA

SEQ ID NO: 75118 - DNA, 80 bp, synthetic construct; identical to SEQ ID NO: 41301
  source 1..80: mol_type = other DNA

SEQ ID NO: 75119 - DNA, 80 bp, synthetic construct; identical to SEQ ID NO: 41302
  source 1..80: mol_type = other DNA

SEQ ID NO: 75120 - DNA, 80 bp, synthetic construct; identical to SEQ ID NO: 41303
  source 1..80: mol_type = other DNA

SEQ ID NO: 75121 - DNA, 80 bp, synthetic construct; identical to SEQ ID NO: 14198
  source 1..80: mol_type = other DNA

SEQ ID NO: 75122 - DNA, 80 bp, synthetic construct; identical to SEQ ID NO: 41306
  source 1..80: mol_type = other DNA

SEQ ID NO: 75123 - DNA, 80 bp, synthetic construct; identical to SEQ ID NO: 41307
  source 1..80: mol_type = other DNA

SEQ ID NO: 75124 - DNA, 80 bp, synthetic construct; identical to SEQ ID NO: 14199
  source 1..80: mol_type = other DNA

SEQ ID NO: 75125 - DNA, 80 bp, synthetic construct; identical to SEQ ID NO: 41309
  source 1..80: mol_type = other DNA

SEQ ID NO: 75126 - DNA, 80 bp, synthetic construct; identical to SEQ ID NO: 41310
  source 1..80: mol_type = other DNA

SEQ ID NO: 75127 - DNA, 80 bp, synthetic construct; identical to SEQ ID NO: 41311
  source 1..80: mol_type = other DNA

SEQ ID NO: 75128 - DNA, 80 bp, synthetic construct; identical to SEQ ID NO: 14200
  source 1..80: mol_type = other DNA

SEQ ID NO: 75129 - DNA, 80 bp, synthetic construct; identical to SEQ ID NO: 41313
  source 1..80: mol_type = other DNA

SEQ ID NO: 75130 - DNA, 80 bp, synthetic construct; identical to SEQ ID NO: 41314
  source 1..80: mol_type = other DNA

SEQ ID NO: 75131 - DNA, 80 bp, synthetic construct; identical to SEQ ID NO: 41315
  source 1..80: mol_type = other DNA

SEQ ID NO: 75132 - DNA, 80 bp, synthetic construct; identical to SEQ ID NO: 14201
  source 1..80: mol_type = other DNA

SEQ ID NO: 75133 - DNA, 80 bp, synthetic construct; identical to SEQ ID NO: 41317
  source 1..80: mol_type = other DNA

SEQ ID NO: 75134 - DNA, 80 bp, synthetic construct; identical to SEQ ID NO: 41318
  source 1..80: mol_type = other DNA

SEQ ID NO: 75135 - DNA, 80 bp, synthetic construct; identical to SEQ ID NO: 41319
  source 1..80: mol_type = other DNA

SEQ ID NO: 75136 - DNA, 80 bp, synthetic construct; identical to SEQ ID NO: 14202
  source 1..80: mol_type = other DNA

SEQ ID NO: 75137 - DNA, 80 bp, synthetic construct; identical to SEQ ID NO: 41321
  source 1..80: mol_type = other DNA

SEQ ID NO: 75138 - DNA, 80 bp, synthetic construct; identical to SEQ ID NO: 41322
  source 1..80: mol_type = other DNA

SEQ ID NO: 75139 - DNA, 80 bp, synthetic construct; identical to SEQ ID NO: 41323
  source 1..80: mol_type = other DNA

SEQ ID NO: 75140 - DNA, 80 bp, synthetic construct; identical to SEQ ID NO: 14203
  source 1..80: mol_type = other DNA

SEQ ID NO: 75141 - DNA, 80 bp, synthetic construct; identical to SEQ ID NO: 41325
  source 1..80: mol_type = other DNA

SEQ ID NO: 75142 - DNA, 80 bp, synthetic construct; identical to SEQ ID NO: 41326
  source 1..80: mol_type = other DNA

SEQ ID NO: 75143 - DNA, 80 bp, synthetic construct; identical to SEQ ID NO: 41327
  source 1..80: mol_type = other DNA

SEQ ID NO: 75144 - DNA, 80 bp, synthetic construct; identical to SEQ ID NO: 14204
  source 1..80: mol_type = other DNA

SEQ ID NO: 75145 - DNA, 80 bp, synthetic construct; identical to SEQ ID NO: 41330
  source 1..80: mol_type = other DNA

SEQ ID NO: 75146 - DNA, 80 bp, synthetic construct; identical to SEQ ID NO: 41331
  source 1..80: mol_type = other DNA

SEQ ID NO: 75147 - DNA, 80 bp, synthetic construct; identical to SEQ ID NO: 41333
  source 1..80: mol_type = other DNA

SEQ ID NO: 75148 - DNA, 80 bp, synthetic construct; identical to SEQ ID NO: 41334
  source 1..80: mol_type = other DNA

SEQ ID NO: 75149 - DNA, 80 bp, synthetic construct; identical to SEQ ID NO: 41335
  source 1..80: mol_type = other DNA

SEQ ID NO: 75150 - DNA, 80 bp, synthetic construct; identical to SEQ ID NO: 14206
  source 1..80: mol_type = other DNA

SEQ ID NO: 75151 - DNA, 80 bp, synthetic construct; identical to SEQ ID NO: 41337
  source 1..80: mol_type = other DNA

SEQ ID NO: 75152 - DNA, 80 bp, synthetic construct; identical to SEQ ID NO: 41339
  source 1..80: mol_type = other DNA

SEQ ID NO: 75153 - DNA, 80 bp, synthetic construct; identical to SEQ ID NO: 41340
  source 1..80: mol_type = other DNA

SEQ ID NO: 75154 - DNA, 80 bp, synthetic construct; identical to SEQ ID NO: 14207
  source 1..80: mol_type = other DNA

SEQ ID NO: 75155 - DNA, 80 bp, synthetic construct; identical to SEQ ID NO: 41342
  source 1..80: mol_type = other DNA

SEQ ID NO: 75156 - DNA, 80 bp, synthetic construct; identical to SEQ ID NO: 41343
  source 1..80: mol_type = other DNA

SEQ ID NO: 75157 - DNA, 80 bp, synthetic construct; identical to SEQ ID NO: 41344
  source 1..80: mol_type = other DNA

SEQ ID NO: 75158 - DNA, 80 bp, synthetic construct; identical to SEQ ID NO: 14208
  source 1..80: mol_type = other DNA

SEQ ID NO: 75159 - DNA, 80 bp, synthetic construct; identical to SEQ ID NO: 41346
  source 1..80: mol_type = other DNA

SEQ ID NO: 75160 - DNA, 80 bp, synthetic construct; identical to SEQ ID NO: 41347
  source 1..80: mol_type = other DNA

SEQ ID NO: 75161 - DNA, 80 bp, synthetic construct; identical to SEQ ID NO: 41348
  source 1..80: mol_type = other DNA

SEQ ID NO: 75162 - DNA, 80 bp, synthetic construct; identical to SEQ ID NO: 14209
  source 1..80: mol_type = other DNA

SEQ ID NO: 75163 - DNA, 80 bp, synthetic construct; identical to SEQ ID NO: 41350
  source 1..80: mol_type = other DNA

SEQ ID NO: 75164 - DNA, 80 bp, synthetic construct; identical to SEQ ID NO: 41351
  source 1..80: mol_type = other DNA

SEQ ID NO: 75165 - DNA, 80 bp, synthetic construct; identical to SEQ ID NO: 14210
  source 1..80: mol_type = other DNA

SEQ ID NO: 75166 - DNA, 80 bp, synthetic construct; identical to SEQ ID NO: 41354
  source 1..80: mol_type = other DNA

SEQ ID NO: 75167 - DNA, 80 bp, synthetic construct; identical to SEQ ID NO: 41355
  source 1..80: mol_type = other DNA

SEQ ID NO: 75168 - DNA, 80 bp, synthetic construct; identical to SEQ ID NO: 14211
  source 1..80: mol_type = other DNA

SEQ ID NO: 75169 - DNA, 80 bp, synthetic construct; identical to SEQ ID NO: 41357
  source 1..80: mol_type = other DNA

SEQ ID NO: 75170 - DNA, 80 bp, synthetic construct; identical to SEQ ID NO: 41358
  source 1..80: mol_type = other DNA

SEQ ID NO: 75171 - DNA, 80 bp, synthetic construct; identical to SEQ ID NO: 41359
  source 1..80: mol_type = other DNA

SEQ ID NO: 75172 - DNA, 80 bp, synthetic construct; identical to SEQ ID NO: 41360
  source 1..80: mol_type = other DNA

SEQ ID NO: 75173 - DNA, 80 bp, synthetic construct; identical to SEQ ID NO: 14212
  source 1..80: mol_type = other DNA

SEQ ID NO: 75174 - DNA, 80 bp, synthetic construct; identical to SEQ ID NO: 41363
  source 1..80: mol_type = other DNA

SEQ ID NO: 75175 - DNA, 80 bp, synthetic construct; identical to SEQ ID NO: 14213
  source 1..80: mol_type = other DNA

SEQ ID NO: 75176 - DNA, 80 bp, synthetic construct; identical to SEQ ID NO: 41365
  source 1..80: mol_type = other DNA

SEQ ID NO: 75177 - DNA, 80 bp, synthetic construct; identical to SEQ ID NO: 41366
  source 1..80: mol_type = other DNA

SEQ ID NO: 75178 - DNA, 80 bp, synthetic construct; identical to SEQ ID NO: 41367
  source 1..80: mol_type = other DNA

SEQ ID NO: 75179 - DNA, 80 bp, synthetic construct; identical to SEQ ID NO: 41368
  source 1..80: mol_type = other DNA

SEQ ID NO: 75180 - DNA, 80 bp, synthetic construct; identical to SEQ ID NO: 14214
  source 1..80: mol_type = other DNA

SEQ ID NO: 75181 - DNA, 80 bp, synthetic construct; identical to SEQ ID NO: 41370
  source 1..80: mol_type = other DNA

SEQ ID NO: 75182 - DNA, 80 bp, synthetic construct; identical to SEQ ID NO: 14215
  source 1..80: mol_type = other DNA

SEQ ID NO: 75183 - DNA, 80 bp, synthetic construct; identical to SEQ ID NO: 41373
  source 1..80: mol_type = other DNA

SEQ ID NO: 75184 - DNA, 80 bp, synthetic construct; identical to SEQ ID NO: 41374
  source 1..80: mol_type = other DNA

SEQ ID NO: 75185 - DNA, 80 bp, synthetic construct; identical to SEQ ID NO: 41375
  source 1..80: mol_type = other DNA

SEQ ID NO: 75186 - DNA, 80 bp, synthetic construct; identical to SEQ ID NO: 14216
  source 1..80: mol_type = other DNA

SEQ ID NO: 75187 - DNA, 80 bp, synthetic construct; identical to SEQ ID NO: 41377
  source 1..80: mol_type = other DNA

SEQ ID NO: 75188 - DNA, 80 bp, synthetic construct; identical to SEQ ID NO: 41378
  source 1..80: mol_type = other DNA

SEQ ID NO: 75189 - DNA, 80 bp, synthetic construct; identical to SEQ ID NO: 41379
  source 1..80: mol_type = other DNA

SEQ ID NO: 75190 - DNA, 80 bp, synthetic construct; identical to SEQ ID NO: 14217
  source 1..80: mol_type = other DNA

SEQ ID NO: 75191 - DNA, 80 bp, synthetic construct; identical to SEQ ID NO: 41381
  source 1..80: mol_type = other DNA

SEQ ID NO: 75192 - DNA, 80 bp, synthetic construct; identical to SEQ ID NO: 41382
  source 1..80: mol_type = other DNA

SEQ ID NO: 75193 - DNA, 80 bp, synthetic construct; identical to SEQ ID NO: 41383
  source 1..80: mol_type = other DNA

SEQ ID NO: 75194 - DNA, 80 bp, synthetic construct; identical to SEQ ID NO: 14218
  source 1..80: mol_type = other DNA

SEQ ID NO: 75195 - DNA, 80 bp, synthetic construct; identical to SEQ ID NO: 41385
  source 1..80: mol_type = other DNA

SEQ ID NO: 75196 - DNA, 80 bp, synthetic construct; identical to SEQ ID NO: 41386
  source 1..80: mol_type = other DNA

SEQ ID NO: 75197 - DNA, 80 bp, synthetic construct; identical to SEQ ID NO: 41387
  source 1..80: mol_type = other DNA

SEQ ID NO: 75198 - DNA, 80 bp, synthetic construct; identical to SEQ ID NO: 14219
  source 1..80: mol_type = other DNA

SEQ ID NO: 75199 - DNA, 80 bp, synthetic construct; identical to SEQ ID NO: 41389
  source 1..80: mol_type = other DNA

SEQ ID NO: 75200 - DNA, 80 bp, synthetic construct; identical to SEQ ID NO: 41391
  source 1..80: mol_type = other DNA

SEQ ID NO: 75201 - DNA, 80 bp, synthetic construct; identical to SEQ ID NO: 14220
  source 1..80: mol_type = other DNA

SEQ ID NO: 75202 - DNA, 80 bp, synthetic construct; identical to SEQ ID NO: 41394
  source 1..80: mol_type = other DNA

SEQ ID NO: 75203 - DNA, 80 bp, synthetic construct; identical to SEQ ID NO: 41395
  source 1..80: mol_type = other DNA

SEQ ID NO: 75204 - DNA, 80 bp, synthetic construct; identical to SEQ ID NO: 14221
  source 1..80: mol_type = other DNA

SEQ ID NO: 75205 - DNA, 80 bp, synthetic construct; identical to SEQ ID NO: 41397
  source 1..80: mol_type = other DNA

SEQ ID NO: 75206 - DNA, 80 bp, synthetic construct; identical to SEQ ID NO: 41398
  source 1..80: mol_type = other DNA

SEQ ID NO: 75207 - DNA, 80 bp, synthetic construct; identical to SEQ ID NO: 41399
  source 1..80: mol_type = other DNA

SEQ ID NO: 75208 - DNA, 80 bp, synthetic construct; identical to SEQ ID NO: 41400
  source 1..80: mol_type = other DNA

SEQ ID NO: 75209 - DNA, 80 bp, synthetic construct; identical to SEQ ID NO: 14222
  source 1..80: mol_type = other DNA

SEQ ID NO: 75210 - DNA, 80 bp, synthetic construct; identical to SEQ ID NO: 41402
  source 1..80: mol_type = other DNA

SEQ ID NO: 75211 - DNA, 80 bp, synthetic construct; identical to SEQ ID NO: 41403
  source 1..80: mol_type = other DNA

SEQ ID NO: 75212 - DNA, 80 bp, synthetic construct; identical to SEQ ID NO: 14223
  source 1..80: mol_type = other DNA

SEQ ID NO: 75213 - DNA, 80 bp, synthetic construct; identical to SEQ ID NO: 41405
  source 1..80: mol_type = other DNA

SEQ ID NO: 75214 - DNA, 80 bp, synthetic construct; identical to SEQ ID NO: 41406
  source 1..80: mol_type = other DNA

SEQ ID NO: 75215 - DNA, 80 bp, synthetic construct; identical to SEQ ID NO: 41407
  source 1..80: mol_type = other DNA

SEQ ID NO: 75216 - DNA, 80 bp, synthetic construct; identical to SEQ ID NO: 41408
  source 1..80: mol_type = other DNA

SEQ ID NO: 75217 - DNA, 80 bp, synthetic construct; identical to SEQ ID NO: 14224
  source 1..80: mol_type = other DNA

SEQ ID NO: 75218 - DNA, 80 bp, synthetic construct; identical to SEQ ID NO: 41410
  source 1..80: mol_type = other DNA

SEQ ID NO: 75219 - DNA, 80 bp, synthetic construct; identical to SEQ ID NO: 41411
  source 1..80: mol_type = other DNA

SEQ ID NO: 75220 - DNA, 80 bp, synthetic construct; identical to SEQ ID NO: 41412
  source 1..80: mol_type = other DNA

SEQ ID NO: 75221 - DNA, 80 bp, synthetic construct; identical to SEQ ID NO: 14225
  source 1..80: mol_type = other DNA

SEQ ID NO: 75222 - DNA, 80 bp, synthetic construct; identical to SEQ ID NO: 41414
  source 1..80: mol_type = other DNA

SEQ ID NO: 75223 - DNA, 80 bp, synthetic construct; identical to SEQ ID NO: 41415
  source 1..80: mol_type = other DNA

SEQ ID NO: 75224 - DNA, 80 bp, synthetic construct; identical to SEQ ID NO: 14226
  source 1..80: mol_type = other DNA

SEQ ID NO: 75225 - DNA, 80 bp, synthetic construct; identical to SEQ ID NO: 41417
  source 1..80: mol_type = other DNA

SEQ ID NO: 75226 - DNA, 80 bp, synthetic construct; identical to SEQ ID NO: 41418
  source 1..80: mol_type = other DNA

SEQ ID NO: 75227 - DNA, 80 bp, synthetic construct; identical to SEQ ID NO: 41419
  source 1..80: mol_type = other DNA

SEQ ID NO: 75228 - DNA, 80 bp, synthetic construct; identical to SEQ ID NO: 14227
  source 1..80: mol_type = other DNA

SEQ ID NO: 75229 - DNA, 80 bp, synthetic construct; identical to SEQ ID NO: 41422
  source 1..80: mol_type = other DNA

SEQ ID NO: 75230 - DNA, 80 bp, synthetic construct; identical to SEQ ID NO: 41423
  source 1..80: mol_type = other DNA

SEQ ID NO: 75231 - DNA, 80 bp, synthetic construct; identical to SEQ ID NO: 14228
  source 1..80: mol_type = other DNA

SEQ ID NO: 75232 - DNA, 80 bp, synthetic construct; identical to SEQ ID NO: 41425
  source 1..80: mol_type = other DNA

SEQ ID NO: 75233 - DNA, 80 bp, synthetic construct; identical to SEQ ID NO: 41426
  source 1..80: mol_type = other DNA

SEQ ID NO: 75234 - DNA, 80 bp, synthetic construct; identical to SEQ ID NO: 41427
  source 1..80: mol_type = other DNA

SEQ ID NO: 75235 - DNA, 80 bp, synthetic construct; identical to SEQ ID NO: 14229
  source 1..80: mol_type = other DNA

SEQ ID NO: 75236 - DNA, 80 bp, synthetic construct; identical to SEQ ID NO: 41429
  source 1..80: mol_type = other DNA

SEQ ID NO: 75237 - DNA, 80 bp, synthetic construct; identical to SEQ ID NO: 41430
  source 1..80: mol_type = other DNA

SEQ ID NO: 75238 - DNA, 80 bp, synthetic construct; identical to SEQ ID NO: 41431
  source 1..80: mol_type = other DNA

SEQ ID NO: 75239 - DNA, 80 bp, synthetic construct; identical to SEQ ID NO: 41432
  source 1..80: mol_type = other DNA

SEQ ID NO: 75240 - DNA, 80 bp, synthetic construct; identical to SEQ ID NO: 41433
  source 1..80: mol_type = other DNA

SEQ ID NO: 75241 - DNA, 80 bp, synthetic construct; identical to SEQ ID NO: 14230
  source 1..80: mol_type = other DNA

SEQ ID NO: 75242 - DNA, 80 bp, synthetic construct; identical to SEQ ID NO: 41436
  source 1..80: mol_type = other DNA

SEQ ID NO: 75243 - DNA, 80 bp, synthetic construct; identical to SEQ ID NO: 14231
  source 1..80: mol_type = other DNA

SEQ ID NO: 75244 - DNA, 80 bp, synthetic construct; identical to SEQ ID NO: 41438
  source 1..80: mol_type = other DNA

SEQ ID NO: 75245 - DNA, 80 bp, synthetic construct; identical to SEQ ID NO: 41440
  source 1..80: mol_type = other DNA

SEQ ID NO: 75246 - DNA, 80 bp, synthetic construct; identical to SEQ ID NO: 14232
  source 1..80: mol_type = other DNA

SEQ ID NO: 75247 - DNA, 80 bp, synthetic construct; identical to SEQ ID NO: 41442
  source 1..80: mol_type = other DNA

SEQ ID NO: 75248 - DNA, 80 bp, synthetic construct; identical to SEQ ID NO: 41443
  source 1..80: mol_type = other DNA

SEQ ID NO: 75249 - DNA, 80 bp, synthetic construct; identical to SEQ ID NO: 41444
  source 1..80: mol_type = other DNA

SEQ ID NO: 75250 - DNA, 80 bp, synthetic construct; identical to SEQ ID NO: 14233
  source 1..80: mol_type = other DNA

SEQ ID NO: 75251 - DNA, 80 bp, synthetic construct; identical to SEQ ID NO: 41446
  source 1..80: mol_type = other DNA

SEQ ID NO: 75252 - DNA, 80 bp, synthetic construct; identical to SEQ ID NO: 41447
  source 1..80: mol_type = other DNA

SEQ ID NO: 75253 - DNA, 80 bp, synthetic construct; identical to SEQ ID NO: 41448
  source 1..80: mol_type = other DNA

SEQ ID NO: 75254 - DNA, 80 bp, synthetic construct; identical to SEQ ID NO: 41449
  source 1..80: mol_type = other DNA

SEQ ID NO: 75255 - DNA, 80 bp, synthetic construct; identical to SEQ ID NO: 14234
  source 1..80: mol_type = other DNA

SEQ ID NO: 75256 - DNA, 80 bp, synthetic construct; identical to SEQ ID NO: 41451
  source 1..80: mol_type = other DNA

SEQ ID NO: 75257 - DNA, 80 bp, synthetic construct; identical to SEQ ID NO: 41452
  source 1..80: mol_type = other DNA

SEQ ID NO: 75258 - DNA, 80 bp, synthetic construct; identical to SEQ ID NO: 41453
  source 1..80: mol_type = other DNA

SEQ ID NO: 75259 - DNA, 80 bp, synthetic construct; identical to SEQ ID NO: 14235
  source 1..80: mol_type = other DNA

SEQ ID NO: 75260 - DNA, 80 bp, synthetic construct; identical to SEQ ID NO: 41455
  source 1..80: mol_type = other DNA

SEQ ID NO: 75261 - DNA, 80 bp, synthetic construct; identical to SEQ ID NO: 14236
  source 1..80: mol_type = other DNA

SEQ ID NO: 75262 - DNA, 80 bp, synthetic construct; identical to SEQ ID NO: 41457
  source 1..80: mol_type = other DNA

SEQ ID NO: 75263 - DNA, 80 bp, synthetic construct; identical to SEQ ID NO: 41458
  source 1..80: mol_type = other DNA

SEQ ID NO: 75264 - DNA, 80 bp, synthetic construct; identical to SEQ ID NO: 41459
  source 1..80: mol_type = other DNA

SEQ ID NO: 75265 - DNA, 80 bp, synthetic construct; identical to SEQ ID NO: 14237
  source 1..80: mol_type = other DNA

SEQ ID NO: 75266 - DNA, 80 bp, synthetic construct; identical to SEQ ID NO: 41461
  source 1..80: mol_type = other DNA

SEQ ID NO: 75267 - DNA, 80 bp, synthetic construct; identical to SEQ ID NO: 41462
  source 1..80: mol_type = other DNA

SEQ ID NO: 75268 - DNA, 80 bp, synthetic construct; identical to SEQ ID NO: 41463
  source 1..80: mol_type = other DNA

SEQ ID NO: 75269 - DNA, 80 bp, synthetic construct; identical to SEQ ID NO: 14238
  source 1..80: mol_type = other DNA

SEQ ID NO: 75270 - DNA, 80 bp, synthetic construct; identical to SEQ ID NO: 41466
  source 1..80: mol_type = other DNA

SEQ ID NO: 75271 - DNA, 80 bp, synthetic construct; identical to SEQ ID NO: 41467
  source 1..80: mol_type = other DNA

SEQ ID NO: 75272 - DNA, 80 bp, synthetic construct; identical to SEQ ID NO: 41468
  source 1..80: mol_type = other DNA

SEQ ID NO: 75273 - DNA, 80 bp, synthetic construct; identical to SEQ ID NO: 14239
  source 1..80: mol_type = other DNA

SEQ ID NO: 75274 - DNA, 80 bp, synthetic construct; identical to SEQ ID NO: 41470
  source 1..80: mol_type = other DNA

SEQ ID NO: 75275 - DNA, 80 bp, synthetic construct; identical to SEQ ID NO: 14240
  source 1..80: mol_type = other DNA

SEQ ID NO: 75276 - DNA, 80 bp, synthetic construct; identical to SEQ ID NO: 41473
  source 1..80: mol_type = other DNA

SEQ ID NO: 75277 - DNA, 80 bp, synthetic construct; identical to SEQ ID NO: 41474
  source 1..80: mol_type = other DNA

SEQ ID NO: 75278 - DNA, 80 bp, synthetic construct; identical to SEQ ID NO: 41475
  source 1..80: mol_type = other DNA

SEQ ID NO: 75279 - DNA, 80 bp, synthetic construct; identical to SEQ ID NO: 14241
  source 1..80: mol_type = other DNA

SEQ ID NO: 75280 - DNA, 80 bp, synthetic construct; identical to SEQ ID NO: 41477
  source 1..80: mol_type = other DNA

SEQ ID NO: 75281 - DNA, 80 bp, synthetic construct; identical to SEQ ID NO: 41478
  source 1..80: mol_type = other DNA

SEQ ID NO: 75282 - DNA, 80 bp, synthetic construct; identical to SEQ ID NO: 41479
  source 1..80: mol_type = other DNA

SEQ ID NO: 75283 - DNA, 80 bp, synthetic construct; identical to SEQ ID NO: 14242
  source 1..80: mol_type = other DNA

SEQ ID NO: 75284 - DNA, 80 bp, synthetic construct; identical to SEQ ID NO: 41481
  source 1..80: mol_type = other DNA

SEQ ID NO: 75285 - DNA, 80 bp, synthetic construct; identical to SEQ ID NO: 41482
  source 1..80: mol_type = other DNA

SEQ ID NO: 75286 - DNA, 80 bp, synthetic construct; identical to SEQ ID NO: 41483
  source 1..80: mol_type = other DNA

SEQ ID NO: 75287 - DNA, 80 bp, synthetic construct; identical to SEQ ID NO: 14243
  source 1..80: mol_type = other DNA

SEQ ID NO: 75288 - DNA, 80 bp, synthetic construct; identical to SEQ ID NO: 41485
  source 1..80: mol_type = other DNA

SEQ ID NO: 75289 - DNA, 80 bp, synthetic construct; identical to SEQ ID NO: 41486
  source 1..80: mol_type = other DNA

SEQ ID NO: 75290 - DNA, 80 bp, synthetic construct; identical to SEQ ID NO: 41487
  source 1..80: mol_type = other DNA

SEQ ID NO: 75291 - DNA, 80 bp, synthetic construct; identical to SEQ ID NO: 14244
  source 1..80: mol_type = other DNA

SEQ ID NO: 75292 - DNA, 80 bp, synthetic construct; identical to SEQ ID NO: 41489
  source 1..80: mol_type = other DNA

SEQ ID NO: 75293 - DNA, 80 bp, synthetic construct; identical to SEQ ID NO: 41490
  source 1..80: mol_type = other DNA

SEQ ID NO: 75294 - DNA, 80 bp, synthetic construct; identical to SEQ ID NO: 41491
  source 1..80: mol_type = other DNA

SEQ ID NO: 75295 - DNA, 80 bp, synthetic construct; identical to SEQ ID NO: 41492
  source 1..80: mol_type = other DNA

SEQ ID NO: 75296 - DNA, 80 bp, synthetic construct; identical to SEQ ID NO: 14245
  source 1..80: mol_type = other DNA

SEQ ID NO: 75297 - DNA, 80 bp, synthetic construct; identical to SEQ ID NO: 41494
  source 1..80: mol_type = other DNA

SEQ ID NO: 75298 - DNA, 80 bp, synthetic construct; identical to SEQ ID NO: 41495
  source 1..80: mol_type = other DNA

SEQ ID NO: 75299 - DNA, 80 bp, synthetic construct; identical to SEQ ID NO: 14246
  source 1..80: mol_type = other DNA

SEQ ID NO: 75300 - DNA, 80 bp, synthetic construct; identical to SEQ ID NO: 41497
  source 1..80: mol_type = other DNA

SEQ ID NO: 75301 - DNA, 80 bp, synthetic construct; identical to SEQ ID NO: 41498
  source 1..80: mol_type = other DNA

SEQ ID NO: 75302 - DNA, 80 bp, synthetic construct; identical to SEQ ID NO: 41499
  source 1..80: mol_type = other DNA

SEQ ID NO: 75303 - DNA, 80 bp, synthetic construct; identical to SEQ ID NO: 14247
  source 1..80: mol_type = other DNA

SEQ ID NO: 75304 - DNA, 80 bp, synthetic construct; identical to SEQ ID NO: 41501
  source 1..80: mol_type = other DNA

SEQ ID NO: 75305 - DNA, 80 bp, synthetic construct; identical to SEQ ID NO: 41502
  source 1..80: mol_type = other DNA

SEQ ID NO: 75306 - DNA, 80 bp, synthetic construct; identical to SEQ ID NO: 41503
  source 1..80: mol_type = other DNA

SEQ ID NO: 75307 - DNA, 80 bp, synthetic construct; identical to SEQ ID NO: 14248
  source 1..80: mol_type = other DNA

SEQ ID NO: 75308 - DNA, 80 bp, synthetic construct; identical to SEQ ID NO: 41505
  source 1..80: mol_type = other DNA

SEQ ID NO: 75309 - DNA, 80 bp, synthetic construct; identical to SEQ ID NO: 41506
  source 1..80: mol_type = other DNA

SEQ ID NO: 75310 - DNA, 80 bp, synthetic construct; identical to SEQ ID NO: 41507
  source 1..80: mol_type = other DNA

SEQ ID NO: 75311 - DNA, 80 bp, synthetic construct; identical to SEQ ID NO: 14249
  source 1..80: mol_type = other DNA

SEQ ID NO: 75312 - DNA, 80 bp, synthetic construct; identical to SEQ ID NO: 41509
  source 1..80: mol_type = other DNA

SEQ ID NO: 75313 - DNA, 80 bp, synthetic construct; identical to SEQ ID NO: 41510
  source 1..80: mol_type = other DNA

SEQ ID NO: 75314 - DNA, 80 bp, synthetic construct; identical to SEQ ID NO: 14250
  source 1..80: mol_type = other DNA

SEQ ID NO: 75315 - DNA, 80 bp, synthetic construct; identical to SEQ ID NO: 41512
  source 1..80: mol_type = other DNA

SEQ ID NO: 75316 - DNA, 80 bp, synthetic construct; identical to SEQ ID NO: 41513
  source 1..80: mol_type = other DNA

SEQ ID NO: 75317 - DNA, 80 bp, synthetic construct; identical to SEQ ID NO: 41514
  source 1..80: mol_type = other DNA

SEQ ID NO: 75318 - DNA, 80 bp, synthetic construct; identical to SEQ ID NO: 41515
  source 1..80: mol_type = other DNA

SEQ ID NO: 75319 - DNA, 80 bp, synthetic construct; identical to SEQ ID NO: 14251
  source 1..80: mol_type = other DNA

SEQ ID NO: 75320 - DNA, 80 bp, synthetic construct; identical to SEQ ID NO: 41517
  source 1..80: mol_type = other DNA

SEQ ID NO: 75321 - DNA, 80 bp, synthetic construct; identical to SEQ ID NO: 41518
  source 1..80: mol_type = other DNA

SEQ ID NO: 75322 - DNA, 80 bp, synthetic construct; identical to SEQ ID NO: 41519
  source 1..80: mol_type = other DNA

SEQ ID NO: 75323 - DNA, 80 bp, synthetic construct; identical to SEQ ID NO: 14252
  source 1..80: mol_type = other DNA

SEQ ID NO: 75324 - DNA, 80 bp, synthetic construct; identical to SEQ ID NO: 41521
  source 1..80: mol_type = other DNA

SEQ ID NO: 75325 - DNA, 80 bp, synthetic construct; identical to SEQ ID NO: 41522
  source 1..80: mol_type = other DNA

SEQ ID NO: 75326 - DNA, 80 bp, synthetic construct; identical to SEQ ID NO: 41523
  source 1..80: mol_type = other DNA

SEQ ID NO: 75327 - DNA, 80 bp, synthetic construct; identical to SEQ ID NO: 14253
  source 1..80: mol_type = other DNA

SEQ ID NO: 75328 - DNA, 80 bp, synthetic construct; identical to SEQ ID NO: 41525
  source 1..80: mol_type = other DNA

SEQ ID NO: 75329 - DNA, 80 bp, synthetic construct; identical to SEQ ID NO: 41526
  source 1..80: mol_type = other DNA

SEQ ID NO: 75330 - DNA, 80 bp, synthetic construct; identical to SEQ ID NO: 41527
  source 1..80: mol_type = other DNA

SEQ ID NO: 75331 - DNA, 80 bp, synthetic construct; identical to SEQ ID NO: 14254
  source 1..80: mol_type = other DNA

SEQ ID NO: 75332 - DNA, 80 bp, synthetic construct; identical to SEQ ID NO: 41530
  source 1..80: mol_type = other DNA

SEQ ID NO: 75333 - DNA, 80 bp, synthetic construct; identical to SEQ ID NO: 14255
  source 1..80: mol_type = other DNA

SEQ ID NO: 75334 - DNA, 80 bp, synthetic construct; identical to SEQ ID NO: 41532
  source 1..80: mol_type = other DNA

SEQ ID NO: 75335 - DNA, 80 bp, synthetic construct; identical to SEQ ID NO: 41533
  source 1..80: mol_type = other DNA

SEQ ID NO: 75336 - DNA, 80 bp, synthetic construct; identical to SEQ ID NO: 41534
  source 1..80: mol_type = other DNA

SEQ ID NO: 75337 - DNA, 80 bp, synthetic construct; identical to SEQ ID NO: 14256
  source 1..80: mol_type = other DNA

SEQ ID NO: 75338 - DNA, 80 bp, synthetic construct; identical to SEQ ID NO: 41536
  source 1..80: mol_type = other DNA

SEQ ID NO: 75339 - DNA, 80 bp, synthetic construct; identical to SEQ ID NO: 41537
  source 1..80: mol_type = other DNA

SEQ ID NO: 75340 - DNA, 80 bp, synthetic construct; identical to SEQ ID NO: 41538
  source 1..80: mol_type = other DNA

SEQ ID NO: 75341 - DNA, 80 bp, synthetic construct; identical to SEQ ID NO: 14257
  source 1..80: mol_type = other DNA

SEQ ID NO: 75342 - DNA, 80 bp, synthetic construct; identical to SEQ ID NO: 41540
  source 1..80: mol_type = other DNA

SEQ ID NO: 75343 - DNA, 80 bp, synthetic construct; identical to SEQ ID NO: 41541
  source 1..80: mol_type = other DNA

SEQ ID NO: 75344 - DNA, 80 bp, synthetic construct; identical to SEQ ID NO: 41542
  source 1..80: mol_type = other DNA

SEQ ID NO: 75345 - DNA, 80 bp, synthetic construct; identical to SEQ ID NO: 14258
  source 1..80: mol_type = other DNA

SEQ ID NO: 75346 - DNA, 80 bp, synthetic construct; identical to SEQ ID NO: 41544
  source 1..80: mol_type = other DNA

SEQ ID NO: 75347 - DNA, 80 bp, synthetic construct; identical to SEQ ID NO: 41545
  source 1..80: mol_type = other DNA

SEQ ID NO: 75348 - DNA, 80 bp, synthetic construct; identical to SEQ ID NO: 41546
  source 1..80: mol_type = other DNA

SEQ ID NO: 75349 - DNA, 80 bp, synthetic construct; identical to SEQ ID NO: 14259
  source 1..80: mol_type = other DNA

SEQ ID NO: 75350 - DNA, 80 bp, synthetic construct; identical to SEQ ID NO: 41548
  source 1..80: mol_type = other DNA

SEQ ID NO: 75351 - DNA, 80 bp, synthetic construct; identical to SEQ ID NO: 41549
  source 1..80: mol_type = other DNA

SEQ ID NO: 75352 - DNA, 80 bp, synthetic construct; identical to SEQ ID NO: 41550
  source 1..80: mol_type = other DNA

SEQ ID NO: 75353 - DNA, 80 bp, synthetic construct; identical to SEQ ID NO: 14260
  source 1..80: mol_type = other DNA

SEQ ID NO: 75354 - DNA, 80 bp, synthetic construct; identical to SEQ ID NO: 41552
  source 1..80: mol_type = other DNA

SEQ ID NO: 75355 - DNA, 80 bp, synthetic construct; identical to SEQ ID NO: 41553
  source 1..80: mol_type = other DNA

SEQ ID NO: 75356 - DNA, 80 bp, synthetic construct; identical to SEQ ID NO: 14261
  source 1..80: mol_type = other DNA

SEQ ID NO: 75357 - DNA, 80 bp, synthetic construct; identical to SEQ ID NO: 41556
  source 1..80: mol_type = other DNA

SEQ ID NO: 75358 - DNA, 80 bp, synthetic construct; identical to SEQ ID NO: 41557
  source 1..80: mol_type = other DNA

SEQ ID NO: 75359 - DNA, 80 bp, synthetic construct; identical to SEQ ID NO: 41558
  source 1..80: mol_type = other DNA

SEQ ID NO: 75360 - DNA, 80 bp, synthetic construct; identical to SEQ ID NO: 14262
  source 1..80: mol_type = other DNA

SEQ ID NO: 75361 - DNA, 80 bp, synthetic construct; identical to SEQ ID NO: 41560
  source 1..80: mol_type = other DNA

SEQ ID NO: 75362 - DNA, 80 bp, synthetic construct; identical to SEQ ID NO: 41561
  source 1..80: mol_type = other DNA

SEQ ID NO: 75363 - DNA, 80 bp, synthetic construct; identical to SEQ ID NO: 41562
  source 1..80: mol_type = other DNA

SEQ ID NO: 75364 - DNA, 80 bp, synthetic construct; identical to SEQ ID NO: 41563
  source 1..80: mol_type = other DNA

SEQ ID NO: 75365 - DNA, 80 bp, synthetic construct; identical to SEQ ID NO: 14263
  source 1..80: mol_type = other DNA

SEQ ID NO: 75366 - DNA, 80 bp, synthetic construct; identical to SEQ ID NO: 41565
  source 1..80: mol_type = other DNA

SEQ ID NO: 75367 - DNA, 80 bp, synthetic construct; identical to SEQ ID NO: 41566
  source 1..80: mol_type = other DNA

SEQ ID NO: 75368 - DNA, 80 bp, synthetic construct; identical to SEQ ID NO: 14264
  source 1..80: mol_type = other DNA

SEQ ID NO: 75369 - DNA, 80 bp, synthetic construct; identical to SEQ ID NO: 41568
  source 1..80: mol_type = other DNA

SEQ ID NO: 75370 - DNA, 80 bp, synthetic construct; identical to SEQ ID NO: 41570
  source 1..80: mol_type = other DNA

SEQ ID NO: 75371 - DNA, 80 bp, synthetic construct; identical to SEQ ID NO: 14265
  source 1..80: mol_type = other DNA

SEQ ID NO: 75372 - DNA, 80 bp, synthetic construct; identical to SEQ ID NO: 41572
  source 1..80: mol_type = other DNA

SEQ ID NO: 75373 - DNA, 80 bp, synthetic construct; identical to SEQ ID NO: 41573
  source 1..80: mol_type = other DNA

SEQ ID NO: 75374 - DNA, 80 bp, synthetic construct; identical to SEQ ID NO: 14266
  source 1..80: mol_type = other DNA

SEQ ID NO: 75375 - DNA, 80 bp, synthetic construct; identical to SEQ ID NO: 41576
  source 1..80: mol_type = other DNA

SEQ ID NO: 75376 - DNA, 80 bp, synthetic construct; identical to SEQ ID NO: 41577
  source 1..80: mol_type = other DNA

SEQ ID NO: 75377 - DNA, 80 bp, synthetic construct; identical to SEQ ID NO: 41578
  source 1..80: mol_type = other DNA

SEQ ID NO: 75378 - DNA, 80 bp, synthetic construct; identical to SEQ ID NO: 41579
  source 1..80: mol_type = other DNA

SEQ ID NO: 75379 - DNA, 80 bp, synthetic construct; identical to SEQ ID NO: 14267
  source 1..80: mol_type = other DNA

SEQ ID NO: 75380 - DNA, 80 bp, synthetic construct; identical to SEQ ID NO: 41581
  source 1..80: mol_type = other DNA

SEQ ID NO: 75381 - DNA, 80 bp, synthetic construct; identical to SEQ ID NO: 41582
  source 1..80: mol_type = other DNA

SEQ ID NO: 75382 - DNA, 80 bp, synthetic construct; identical to SEQ ID NO: 14268
  source 1..80: mol_type = other DNA

SEQ ID NO: 75383 - DNA, 80 bp, synthetic construct; identical to SEQ ID NO: 41584
  source 1..80: mol_type = other DNA

SEQ ID NO: 75384 - DNA, 80 bp, synthetic construct; identical to SEQ ID NO: 41585
  source 1..80: mol_type = other DNA

SEQ ID NO: 75385 - DNA, 80 bp, synthetic construct; identical to SEQ ID NO: 41586
  source 1..80: mol_type = other DNA

SEQ ID NO: 75386 - DNA, 80 bp, synthetic construct; identical to SEQ ID NO: 41587
  source 1..80: mol_type = other DNA

SEQ ID NO: 75387 - DNA, 80 bp, synthetic construct; identical to SEQ ID NO: 14269
  source 1..80: mol_type = other DNA

SEQ ID NO: 75388 - DNA, 80 bp, synthetic construct; identical to SEQ ID NO: 41590
  source 1..80: mol_type = other DNA

SEQ ID NO: 75389 - DNA, 80 bp, synthetic construct; identical to SEQ ID NO: 14270
  source 1..80: mol_type = other DNA

SEQ ID NO: 75390 - DNA, 80 bp, synthetic construct; identical to SEQ ID NO: 41592
  source 1..80: mol_type = other DNA

SEQ ID NO: 75391 - DNA, 80 bp, synthetic construct; identical to SEQ ID NO: 41593
  source 1..80: mol_type = other DNA

SEQ ID NO: 75392 - DNA, 80 bp, synthetic construct; identical to SEQ ID NO: 41594
  source 1..80: mol_type = other DNA

SEQ ID NO: 75393 - DNA, 80 bp, synthetic construct; identical to SEQ ID NO: 14271
  source 1..80: mol_type = other DNA

SEQ ID NO: 75394 - DNA, 80 bp, synthetic construct; identical to SEQ ID NO: 41596
  source 1..80: mol_type = other DNA

SEQ ID NO: 75395 - DNA, 80 bp, synthetic construct; identical to SEQ ID NO: 41598
  source 1..80: mol_type = other DNA

SEQ ID NO: 75396 - DNA, 80 bp, synthetic construct; identical to SEQ ID NO: 14272
  source 1..80: mol_type = other DNA

SEQ ID NO: 75397 - DNA, 80 bp, synthetic construct; identical to SEQ ID NO: 41600
  source 1..80: mol_type = other DNA

SEQ ID NO: 75398 - DNA, 80 bp, synthetic construct; identical to SEQ ID NO: 41601
  source 1..80: mol_type = other DNA

SEQ ID NO: 75399 - DNA, 80 bp, synthetic construct; identical to SEQ ID NO: 41602
  source 1..80: mol_type = other DNA

SEQ ID NO: 75400 - DNA, 80 bp, synthetic construct; identical to SEQ ID NO: 14273
  source 1..80: mol_type = other DNA

SEQ ID NO: 75401 - DNA, 80 bp, synthetic construct; identical to SEQ ID NO: 41604
  source 1..80: mol_type = other DNA

SEQ ID NO: 75402 - DNA, 80 bp, synthetic construct; identical to SEQ ID NO: 41605
  source 1..80: mol_type = other DNA

SEQ ID NO: 75403 - DNA, 80 bp, synthetic construct; identical to SEQ ID NO: 41606
  source 1..80: mol_type = other DNA

SEQ ID NO: 75404 - DNA, 80 bp, synthetic construct; identical to SEQ ID NO: 41607
  source 1..80: mol_type = other DNA

SEQ ID NO: 75405 - DNA, 80 bp, synthetic construct; identical to SEQ ID NO: 14274
  source 1..80: mol_type = other DNA

SEQ ID NO: 75406 - DNA, 80 bp, synthetic construct; identical to SEQ ID NO: 41609
  source 1..80: mol_type = other DNA

SEQ ID NO: 75407 - DNA, 80 bp, synthetic construct; identical to SEQ ID NO: 14275
  source 1..80: mol_type = other DNA

SEQ ID NO: 75408 - DNA, 80 bp, synthetic construct; identical to SEQ ID NO: 41611
  source 1..80: mol_type = other DNA

SEQ ID NO: 75409 - DNA, 80 bp, synthetic construct; identical to SEQ ID NO: 41612
  source 1..80: mol_type = other DNA

SEQ ID NO: 75410 - DNA, 80 bp, synthetic construct; identical to SEQ ID NO: 41613
  source 1..80: mol_type = other DNA

SEQ ID NO: 75411 - DNA, 80 bp, synthetic construct; identical to SEQ ID NO: 41614
  source 1..80: mol_type = other DNA

SEQ ID NO: 75412 - DNA, 80 bp, synthetic construct; identical to SEQ ID NO: 14276
  source 1..80: mol_type = other DNA

SEQ ID NO: 75413 - DNA, 80 bp, synthetic construct; identical to SEQ ID NO: 41616
  source 1..80: mol_type = other DNA

SEQ ID NO: 75414 - DNA, 80 bp, synthetic construct; identical to SEQ ID NO: 41617
  source 1..80: mol_type = other DNA

SEQ ID NO: 75415 - DNA, 80 bp, synthetic construct; identical to SEQ ID NO: 14277
  source 1..80: mol_type = other DNA

SEQ ID NO: 75416 - DNA, 80 bp, synthetic construct; identical to SEQ ID NO: 41619
  source 1..80: mol_type = other DNA

SEQ ID NO: 75417 - DNA, 80 bp, synthetic construct; identical to SEQ ID NO: 41620
  source 1..80: mol_type = other DNA

SEQ ID NO: 75418 - DNA, 80 bp, synthetic construct; identical to SEQ ID NO: 41621
  source 1..80: mol_type = other DNA

SEQ ID NO: 75419 - DNA, 80 bp, synthetic construct; identical to SEQ ID NO: 14278
  source 1..80: mol_type = other DNA

SEQ ID NO: 75420 - DNA, 80 bp, synthetic construct; identical to SEQ ID NO: 41623
  source 1..80: mol_type = other DNA

SEQ ID NO: 75421 - DNA, 80 bp, synthetic construct; identical to SEQ ID NO: 41624
  source 1..80: mol_type = other DNA

SEQ ID NO: 75422 - DNA, 80 bp, synthetic construct; identical to SEQ ID NO: 41625
  source 1..80: mol_type = other DNA

SEQ ID NO: 75423 - DNA, 80 bp, synthetic construct; identical to SEQ ID NO: 14279
  source 1..80: mol_type = other DNA

SEQ ID NO: 75424 - DNA, 80 bp, synthetic construct; identical to SEQ ID NO: 41627
  source 1..80: mol_type = other DNA

SEQ ID NO: 75425 - DNA, 80 bp, synthetic construct; identical to SEQ ID NO: 41628
  source 1..80: mol_type = other DNA

SEQ ID NO: 75426 - DNA, 80 bp, synthetic construct; identical to SEQ ID NO: 41629
  source 1..80: mol_type = other DNA

SEQ ID NO: 75427 - DNA, 80 bp, synthetic construct; identical to SEQ ID NO: 41630
  source 1..80: mol_type = other DNA

SEQ ID NO: 75428 - DNA, 80 bp, synthetic construct; identical to SEQ ID NO: 14280
  source 1..80: mol_type = other DNA

SEQ ID NO: 75429 - DNA, 80 bp, synthetic construct; identical to SEQ ID NO: 41632
  source 1..80: mol_type = other DNA

SEQ ID NO: 75430 - DNA, 80 bp, synthetic construct; identical to SEQ ID NO: 41633
  source 1..80: mol_type = other DNA

SEQ ID NO: 75431 - DNA, 80 bp, synthetic construct; identical to SEQ ID NO: 14281
  source 1..80: mol_type = other DNA

SEQ ID NO: 75432 - DNA, 80 bp, synthetic construct; identical to SEQ ID NO: 41635
  source 1..80: mol_type = other DNA

SEQ ID NO: 75433 - DNA, 80 bp, synthetic construct; identical to SEQ ID NO: 41636
  source 1..80: mol_type = other DNA

SEQ ID NO: 75434 - DNA, 80 bp, synthetic construct; identical to SEQ ID NO: 41637
  source 1..80: mol_type = other DNA

SEQ ID NO: 75435 - DNA, 80 bp, synthetic construct; identical to SEQ ID NO: 14282
  source 1..80: mol_type = other DNA

SEQ ID NO: 75436 - DNA, 80 bp, synthetic construct; identical to SEQ ID NO: 41639
  source 1..80: mol_type = other DNA

SEQ ID NO: 75437 - DNA, 80 bp, synthetic construct; identical to SEQ ID NO: 41640
  source 1..80: mol_type = other DNA

SEQ ID NO: 75438 - DNA, 80 bp, synthetic construct; identical to SEQ ID NO: 14283
  source 1..80: mol_type = other DNA

SEQ ID NO: 75439 - DNA, 80 bp, synthetic construct; identical to SEQ ID NO: 41644
  source 1..80: mol_type = other DNA

SEQ ID NO: 75440 - DNA, 80 bp, synthetic construct; identical to SEQ ID NO: 41646
  source 1..80: mol_type = other DNA

SEQ ID NO: 75441 - DNA, 80 bp, synthetic construct; identical to SEQ ID NO: 14284
  source 1..80: mol_type = other DNA

SEQ ID NO: 75442 - DNA, 80 bp, synthetic construct; identical to SEQ ID NO: 41648
  source 1..80: mol_type = other DNA

SEQ ID NO: 75443 - DNA, 80 bp, synthetic construct; identical to SEQ ID NO: 41649
  source 1..80: mol_type = other DNA

SEQ ID NO: 75444 - DNA, 80 bp, synthetic construct; identical to SEQ ID NO: 14285
  source 1..80: mol_type = other DNA

SEQ ID NO: 75445 - DNA, 80 bp, synthetic construct; identical to SEQ ID NO: 41651
  source 1..80: mol_type = other DNA

SEQ ID NO: 75446 - DNA, 80 bp, synthetic construct; identical to SEQ ID NO: 41652
  source 1..80: mol_type = other DNA

SEQ ID NO: 75447 - DNA, 80 bp, synthetic construct; identical to SEQ ID NO: 41653
  source 1..80: mol_type = other DNA

SEQ ID NO: 75448 - DNA, 80 bp, synthetic construct; identical to SEQ ID NO: 41654
  source 1..80: mol_type = other DNA

SEQ ID NO: 75449 - DNA, 80 bp, synthetic construct; identical to SEQ ID NO: 14286
  source 1..80: mol_type = other DNA

SEQ ID NO: 75450 - DNA, 80 bp, synthetic construct; identical to SEQ ID NO: 41656
  source 1..80: mol_type = other DNA

SEQ ID NO: 75451 - DNA, 80 bp, synthetic construct; identical to SEQ ID NO: 41657
  source 1..80: mol_type = other DNA

SEQ ID NO: 75452 - DNA, 80 bp, synthetic construct; identical to SEQ ID NO: 41658
  source 1..80: mol_type = other DNA

SEQ ID NO: 75453 - DNA, 80 bp, synthetic construct; identical to SEQ ID NO: 14287
  source 1..80: mol_type = other DNA

SEQ ID NO: 75454 - DNA, 80 bp, synthetic construct; identical to SEQ ID NO: 41660
  source 1..80: mol_type = other DNA

SEQ ID NO: 75455 - DNA, 80 bp, synthetic construct; identical to SEQ ID NO: 41661
  source 1..80: mol_type = other DNA

SEQ ID NO: 75456 - DNA, 80 bp, synthetic construct; identical to SEQ ID NO: 14288
  source 1..80: mol_type = other DNA

SEQ ID NO: 75457 - DNA, 80 bp, synthetic construct; identical to SEQ ID NO: 41664
  source 1..80: mol_type = other DNA

SEQ ID NO: 75458 - DNA, 80 bp, synthetic construct; identical to SEQ ID NO: 41665
  source 1..80: mol_type = other DNA

SEQ ID NO: 75459 - DNA, 80 bp, synthetic construct; identical to SEQ ID NO: 14289
  source 1..80: mol_type = other DNA

SEQ ID NO: 75460 - DNA, 80 bp, synthetic construct; identical to SEQ ID NO: 41667
  source 1..80: mol_type = other DNA

SEQ ID NO: 75461 - DNA, 80 bp, synthetic construct; identical to SEQ ID NO: 41668
  source 1..80: mol_type = other DNA

SEQ ID NO: 75462 - DNA, 80 bp, synthetic construct; identical to SEQ ID NO: 41669
  source 1..80: mol_type = other DNA

SEQ ID NO: 75463 - DNA, 80 bp, synthetic construct; identical to SEQ ID NO: 14290
  source 1..80: mol_type = other DNA

SEQ ID NO: 75464 - DNA, 80 bp, synthetic construct; identical to SEQ ID NO: 41671
  source 1..80: mol_type = other DNA

SEQ ID NO: 75465 - DNA, 80 bp, synthetic construct; identical to SEQ ID NO: 41672
  source 1..80: mol_type = other DNA

SEQ ID NO: 75466 - DNA, 80 bp, synthetic construct; identical to SEQ ID NO: 41673
  source 1..80: mol_type = other DNA

SEQ ID NO: 75467 - DNA, 80 bp, synthetic construct; identical to SEQ ID NO: 14291
  source 1..80: mol_type = other DNA

SEQ ID NO: 75468 - DNA, 80 bp, synthetic construct; identical to SEQ ID NO: 41675
  source 1..80: mol_type = other DNA

SEQ ID NO: 75469 - DNA, 80 bp, synthetic construct; identical to SEQ ID NO: 41676
  source 1..80: mol_type = other DNA

SEQ ID NO: 75470 - DNA, 80 bp, synthetic construct; identical to SEQ ID NO: 41677
  source 1..80: mol_type = other DNA

SEQ ID NO: 75471 - DNA, 80 bp, synthetic construct; identical to SEQ ID NO: 14292
  source 1..80: mol_type = other DNA

SEQ ID NO: 75472 - DNA, 80 bp, synthetic construct; identical to SEQ ID NO: 41679
  source 1..80: mol_type = other DNA

SEQ ID NO: 75473 - DNA, 80 bp, synthetic construct; identical to SEQ ID NO: 41681
  source 1..80: mol_type = other DNA

SEQ ID NO: 75474 - DNA, 80 bp, synthetic construct; identical to SEQ ID NO: 41682
  source 1..80: mol_type = other DNA

SEQ ID NO: 75475 - DNA, 80 bp, synthetic construct; identical to SEQ ID NO: 14293
  source 1..80: mol_type = other DNA

SEQ ID NO: 75476 - DNA, 80 bp, synthetic construct; identical to SEQ ID NO: 41684
  source 1..80: mol_type = other DNA

SEQ ID NO: 75477 - DNA, 80 bp, synthetic construct; identical to SEQ ID NO: 41685
  source 1..80: mol_type = other DNA

SEQ ID NO: 75478 - DNA, 80 bp, synthetic construct; identical to SEQ ID NO: 41686
  source 1..80: mol_type = other DNA

SEQ ID NO: 75479 - DNA, 80 bp, synthetic construct; identical to SEQ ID NO: 14294
  source 1..80: mol_type = other DNA

SEQ ID NO: 75480 - DNA, 80 bp, synthetic construct; identical to SEQ ID NO: 41688
  source 1..80: mol_type = other DNA

SEQ ID NO: 75481 - DNA, 80 bp, synthetic construct; identical to SEQ ID NO: 41689
  source 1..80: mol_type = other DNA

SEQ ID NO: 75482 - DNA, 80 bp, synthetic construct; identical to SEQ ID NO: 41690
  source 1..80: mol_type = other DNA

SEQ ID NO: 75483 - DNA, 80 bp, synthetic construct; identical to SEQ ID NO: 14295
  source 1..80: mol_type = other DNA

SEQ ID NO: 75484 - DNA, 80 bp, synthetic construct; identical to SEQ ID NO: 14296
  source 1..80: mol_type = other DNA

SEQ ID NO: 75485 - DNA, 80 bp, synthetic construct; identical to SEQ ID NO: 41694
  source 1..80: mol_type = other DNA

SEQ ID NO: 75486 - DNA, 80 bp, synthetic construct; identical to SEQ ID NO: 41695
  source 1..80: mol_type = other DNA

SEQ ID NO: 75487 - DNA, 80 bp, synthetic construct; identical to SEQ ID NO: 41696
  source 1..80: mol_type = other DNA

SEQ ID NO: 75488 - DNA, 80 bp, synthetic construct; identical to SEQ ID NO: 14297
  source 1..80: mol_type = other DNA

SEQ ID NO: 75489 - DNA, 80 bp, synthetic construct; identical to SEQ ID NO: 41698
  source 1..80: mol_type = other DNA

SEQ ID NO: 75490 - DNA, 80 bp, synthetic construct; identical to SEQ ID NO: 41700
  source 1..80: mol_type = other DNA

SEQ ID NO: 75491 - DNA, 80 bp, synthetic construct; identical to SEQ ID NO: 41701
  source 1..80: mol_type = other DNA

SEQ ID NO: 75492 - DNA, 80 bp, synthetic construct; identical to SEQ ID NO: 14298
  source 1..80: mol_type = other DNA

SEQ ID NO: 75493 - DNA, 80 bp, synthetic construct; identical to SEQ ID NO: 41703
  source 1..80: mol_type = other DNA

SEQ ID NO: 75494 - DNA, 80 bp, synthetic construct; identical to SEQ ID NO: 41704
  source 1..80: mol_type = other DNA

SEQ ID NO: 75495 - DNA, 80 bp, synthetic construct; identical to SEQ ID NO: 41705
  source 1..80: mol_type = other DNA

SEQ ID NO: 75496 - DNA, 80 bp, synthetic construct; identical to SEQ ID NO: 14299
  source 1..80: mol_type = other DNA

SEQ ID NO: 75497 - DNA, 80 bp, synthetic construct; identical to SEQ ID NO: 41707
  source 1..80: mol_type = other DNA

SEQ ID NO: 75498 - DNA, 80 bp, synthetic construct; identical to SEQ ID NO: 41708
  source 1..80: mol_type = other DNA

SEQ ID NO: 75499 - DNA, 80 bp, synthetic construct; identical to SEQ ID NO: 14300
  source 1..80: mol_type = other DNA

SEQ ID NO: 75500 - DNA, 80 bp, synthetic construct; identical to SEQ ID NO: 41710
  source 1..80: mol_type = other DNA

SEQ ID NO: 75501 - DNA, 80 bp, synthetic construct; identical to SEQ ID NO: 41711
  source 1..80: mol_type = other DNA

SEQ ID NO: 75502 - DNA, 80 bp, synthetic construct; identical to SEQ ID NO: 41712
  source 1..80: mol_type = other DNA

SEQ ID NO: 75503 - DNA, 80 bp, synthetic construct; identical to SEQ ID NO: 14301
  source 1..80: mol_type = other DNA

SEQ ID NO: 75504 - DNA, 80 bp, synthetic construct; identical to SEQ ID NO: 41714
  source 1..80: mol_type = other DNA

SEQ ID NO: 75505 - DNA, 80 bp, synthetic construct; identical to SEQ ID NO: 41715
  source 1..80: mol_type = other DNA

SEQ ID NO: 75506 - DNA, 80 bp, synthetic construct; identical to SEQ ID NO: 41716
  source 1..80: mol_type = other DNA

SEQ ID NO: 75507 - DNA, 80 bp, synthetic construct; identical to SEQ ID NO: 41717
  source 1..80: mol_type = other DNA

SEQ ID NO: 75508 - DNA, 80 bp, synthetic construct; identical to SEQ ID NO: 14302
  source 1..80: mol_type = other DNA

SEQ ID NO: 75509 - DNA, 80 bp, synthetic construct; identical to SEQ ID NO: 41719
  source 1..80: mol_type = other DNA

SEQ ID NO: 75510 - DNA, 80 bp, synthetic construct; identical to SEQ ID NO: 41720
  source 1..80: mol_type = other DNA

SEQ ID NO: 75511 - DNA, 80 bp, synthetic construct; identical to SEQ ID NO: 41721
  source 1..80: mol_type = other DNA

SEQ ID NO: 75512 - DNA, 80 bp, synthetic construct; identical to SEQ ID NO: 14303
  source 1..80: mol_type = other DNA

SEQ ID NO: 75513 - DNA, 80 bp, synthetic construct; identical to SEQ ID NO: 41723
  source 1..80: mol_type = other DNA

SEQ ID NO: 75514 - DNA, 80 bp, synthetic construct; identical to SEQ ID NO: 41724
  source 1..80: mol_type = other DNA

SEQ ID NO: 75515 - DNA, 80 bp, synthetic construct; identical to SEQ ID NO: 14304
  source 1..80: mol_type = other DNA

SEQ ID NO: 75516 - DNA, 80 bp, synthetic construct; identical to SEQ ID NO: 41726
  source 1..80: mol_type = other DNA

SEQ ID NO: 75517 - DNA, 80 bp, synthetic construct; identical to SEQ ID NO: 41727
  source 1..80: mol_type = other DNA

SEQ ID NO: 75518 - DNA, 80 bp, synthetic construct; identical to SEQ ID NO: 41728
  source 1..80: mol_type = other DNA

SEQ ID NO: 75519 - DNA, 80 bp, synthetic construct; identical to SEQ ID NO: 14305
  source 1..80: mol_type = other DNA

SEQ ID NO: 75520 - DNA, 80 bp, synthetic construct; identical to SEQ ID NO: 41730
  source 1..80: mol_type = other DNA

SEQ ID NO: 75521 - DNA, 80 bp, synthetic construct; identical to SEQ ID NO: 41731
  source 1..80: mol_type = other DNA

SEQ ID NO: 75522 - DNA, 80 bp, synthetic construct; identical to SEQ ID NO: 41732
  source 1..80: mol_type = other DNA

SEQ ID NO: 75523 - DNA, 80 bp, synthetic construct; identical to SEQ ID NO: 41733
  source 1..80: mol_type = other DNA

SEQ ID NO: 75524 - DNA, 80 bp, synthetic construct; identical to SEQ ID NO: 14306
  source 1..80: mol_type = other DNA

SEQ ID NO: 75525 - DNA, 80 bp, synthetic construct; identical to SEQ ID NO: 41735
  source 1..80: mol_type = other DNA

SEQ ID NO: 75526 - DNA, 80 bp, synthetic construct; identical to SEQ ID NO: 41736
  source 1..80: mol_type = other DNA

SEQ ID NO: 75527 - DNA, 80 bp, synthetic construct; identical to SEQ ID NO: 41737
  source 1..80: mol_type = other DNA

SEQ ID NO: 75528 - DNA, 80 bp, synthetic construct; identical to SEQ ID NO: 14307
  source 1..80: mol_type = other DNA

SEQ ID NO: 75529 - DNA, 80 bp, synthetic construct; identical to SEQ ID NO: 41739
  source 1..80: mol_type = other DNA

SEQ ID NO: 75530 - DNA, 80 bp, synthetic construct; identical to SEQ ID NO: 41740
  source 1..80: mol_type = other DNA

SEQ ID NO: 75531 - DNA, 80 bp, synthetic construct; identical to SEQ ID NO: 41741
  source 1..80: mol_type = other DNA

SEQ ID NO: 75532 - DNA, 80 bp, synthetic construct; identical to SEQ ID NO: 14308
  source 1..80: mol_type = other DNA

SEQ ID NO: 75533 - DNA, 80 bp, synthetic construct; identical to SEQ ID NO: 41743
  source 1..80: mol_type = other DNA

SEQ ID NO: 75534 - DNA, 80 bp, synthetic construct; identical to SEQ ID NO: 41744
  source 1..80: mol_type = other DNA

SEQ ID NO: 75535 - DNA, 80 bp, synthetic construct; identical to SEQ ID NO: 41745
  source 1..80: mol_type = other DNA

SEQ ID NO: 75536 - DNA, 80 bp, synthetic construct; identical to SEQ ID NO: 14309
  source 1..80: mol_type = other DNA

SEQ ID NO: 75537 - DNA, 80 bp, synthetic construct; identical to SEQ ID NO: 41747
  source 1..80: mol_type = other DNA

SEQ ID NO: 75538 - DNA, 80 bp, synthetic construct; identical to SEQ ID NO: 41748
  source 1..80: mol_type = other DNA

SEQ ID NO: 75539 - DNA, 80 bp, synthetic construct; identical to SEQ ID NO: 14310
  source 1..80: mol_type = other DNA

SEQ ID NO: 75540 - DNA, 80 bp, synthetic construct; identical to SEQ ID NO: 41750
  source 1..80: mol_type = other DNA

SEQ ID NO: 75541 - DNA, 80 bp, synthetic construct; identical to SEQ ID NO: 41751
  source 1..80: mol_type = other DNA

SEQ ID NO: 75542 - DNA, 80 bp, synthetic construct; identical to SEQ ID NO: 41752
  source 1..80: mol_type = other DNA

SEQ ID NO: 75543 - DNA, 80 bp, synthetic construct; identical to SEQ ID NO: 14311
  source 1..80: mol_type = other DNA

SEQ ID NO: 75544 - DNA, 80 bp, synthetic construct; identical to SEQ ID NO: 41754
  source 1..80: mol_type = other DNA

SEQ ID NO: 75545 - DNA, 80 bp, synthetic construct; identical to SEQ ID NO: 41755
  source 1..80: mol_type = other DNA

SEQ ID NO: 75546 - DNA, 80 bp, synthetic construct; identical to SEQ ID NO: 41756
  source 1..80: mol_type = other DNA

SEQ ID NO: 75547 - DNA, 80 bp, synthetic construct; identical to SEQ ID NO: 14312
  source 1..80: mol_type = other DNA

SEQ ID NO: 75548 - DNA, 80 bp, synthetic construct; identical to SEQ ID NO: 41758
  source 1..80: mol_type = other DNA

SEQ ID NO: 75549 - DNA, 80 bp, synthetic construct; identical to SEQ ID NO: 41759
  source 1..80: mol_type = other DNA

SEQ ID NO: 75550 - DNA, 80 bp, synthetic construct; identical to SEQ ID NO: 41760
  source 1..80: mol_type = other DNA

SEQ ID NO: 75551 - DNA, 80 bp, synthetic construct; identical to SEQ ID NO: 14313
  source 1..80: mol_type = other DNA

SEQ ID NO: 75552 - DNA, 80 bp, synthetic construct; identical to SEQ ID NO: 41762
  source 1..80: mol_type = other DNA

SEQ ID NO: 75553 - DNA, 80 bp, synthetic construct; identical to SEQ ID NO: 41763
  source 1..80: mol_type = other DNA

SEQ ID NO: 75554 - DNA, 80 bp, synthetic construct; identical to SEQ ID NO: 41764
  source 1..80: mol_type = other DNA

SEQ ID NO: 75555 - DNA, 80 bp, synthetic construct; identical to SEQ ID NO: 14314
  source 1..80: mol_type = other DNA

SEQ ID NO: 75556 - DNA, 80 bp, synthetic construct; identical to SEQ ID NO: 41766
  source 1..80: mol_type = other DNA

SEQ ID NO: 75557 - DNA, 80 bp, synthetic construct; identical to SEQ ID NO: 41767
  source 1..80: mol_type = other DNA

SEQ ID NO: 75558 - DNA, 80 bp, synthetic construct; identical to SEQ ID NO: 14315
  source 1..80: mol_type = other DNA

SEQ ID NO: 75559 - DNA, 80 bp, synthetic construct; identical to SEQ ID NO: 41769
  source 1..80: mol_type = other DNA

SEQ ID NO: 75560 - DNA, 80 bp, synthetic construct; identical to SEQ ID NO: 41770
  source 1..80: mol_type = other DNA

SEQ ID NO: 75561 - DNA, 80 bp, synthetic construct; identical to SEQ ID NO: 41772
  source 1..80: mol_type = other DNA

SEQ ID NO: 75562 - DNA, 80 bp, synthetic construct; identical to SEQ ID NO: 14316
  source 1..80: mol_type = other DNA

SEQ ID NO: 75563 - DNA, 80 bp, synthetic construct; identical to SEQ ID NO: 41774
  source 1..80: mol_type = other DNA

SEQ ID NO: 75564 - DNA, 80 bp, synthetic construct; identical to SEQ ID NO: 41775
  source 1..80: mol_type = other DNA

SEQ ID NO: 75565 - DNA, 80 bp, synthetic construct; identical to SEQ ID NO: 41777
  source 1..80: mol_type = other DNA

SEQ ID NO: 75566 - DNA, 80 bp, synthetic construct; identical to SEQ ID NO: 41778
  source 1..80: mol_type = other DNA

SEQ ID NO: 75567 - DNA, 80 bp, synthetic construct; identical to SEQ ID NO: 14318
  source 1..80: mol_type = other DNA

SEQ ID NO: 75568 - DNA, 80 bp, synthetic construct; identical to SEQ ID NO: 41782
  source 1..80: mol_type = other DNA

SEQ ID NO: 75569 - DNA, 80 bp, synthetic construct; identical to SEQ ID NO: 41783
  source 1..80: mol_type = other DNA

SEQ ID NO: 75570 - DNA, 80 bp, synthetic construct; identical to SEQ ID NO: 41784
  source 1..80: mol_type = other DNA

SEQ ID NO: 75571 - DNA, 80 bp, synthetic construct; identical to SEQ ID NO: 14319
  source 1..80: mol_type = other DNA

SEQ ID NO: 75572 - DNA, 80 bp, synthetic construct; identical to SEQ ID NO: 41786
  source 1..80: mol_type = other DNA

SEQ ID NO: 75573 - DNA, 80 bp, synthetic construct; identical to SEQ ID NO: 41787
  source 1..80: mol_type = other DNA

SEQ ID NO: 75574 - DNA, 80 bp, synthetic construct; identical to SEQ ID NO: 14320
  source 1..80: mol_type = other DNA

SEQ ID NO: 75575 - DNA, 80 bp, synthetic construct; identical to SEQ ID NO: 41789
  source 1..80: mol_type = other DNA

SEQ ID NO: 75576 - DNA, 80 bp, synthetic construct; identical to SEQ ID NO: 41790
  source 1..80: mol_type = other DNA

SEQ ID NO: 75577 - DNA, 80 bp, synthetic construct; identical to SEQ ID NO: 41791
  source 1..80: mol_type = other DNA

SEQ ID NO: 75578 - DNA, 80 bp, synthetic construct; identical to SEQ ID NO: 14321
  source 1..80: mol_type = other DNA

SEQ ID NO: 75579 - DNA, 80 bp, synthetic construct; identical to SEQ ID NO: 41794
  source 1..80: mol_type = other DNA

SEQ ID NO: 75580 - DNA, 80 bp, synthetic construct; identical to SEQ ID NO: 41795
  source 1..80: mol_type = other DNA

SEQ ID NO: 75581 - DNA, 80 bp, synthetic construct; identical to SEQ ID NO: 41796
  source 1..80: mol_type = other DNA

SEQ ID NO: 75582 - DNA, 80 bp, synthetic construct; identical to SEQ ID NO: 14322
  source 1..80: mol_type = other DNA

SEQ ID NO: 75583 - DNA, 80 bp, synthetic construct; identical to SEQ ID NO: 41798
  source 1..80: mol_type = other DNA

SEQ ID NO: 75584 - DNA, 80 bp, synthetic construct; identical to SEQ ID NO: 41799
  source 1..80: mol_type = other DNA

SEQ ID NO: 75585 - DNA, 80 bp, synthetic construct; identical to SEQ ID NO: 14323
  source 1..80: mol_type = other DNA

SEQ ID NO: 75586 - DNA, 80 bp, synthetic construct; identical to SEQ ID NO: 41801
  source 1..80: mol_type = other DNA

SEQ ID NO: 75587 - DNA, 80 bp, synthetic construct; identical to SEQ ID NO: 41802
  source 1..80: mol_type = other DNA

SEQ ID NO: 75588 - DNA, 80 bp, synthetic construct; identical to SEQ ID NO: 41803
  source 1..80: mol_type = other DNA

SEQ ID NO: 75589 - DNA, 80 bp, synthetic construct; identical to SEQ ID NO: 14324
  source 1..80: mol_type = other DNA

SEQ ID NO: 75590 - DNA, 80 bp, synthetic construct; identical to SEQ ID NO: 41806
  source 1..80: mol_type = other DNA

SEQ ID NO: 75591 - DNA, 80 bp, synthetic construct; identical to SEQ ID NO: 41807
  source 1..80: mol_type = other DNA

SEQ ID NO: 75592 - DNA, 80 bp, synthetic construct; identical to SEQ ID NO: 14325
  source 1..80: mol_type = other DNA

SEQ ID NO: 75593 - DNA, 80 bp, synthetic construct; identical to SEQ ID NO: 41809
  source 1..80: mol_type = other DNA

SEQ ID NO: 75594 - DNA, 80 bp, synthetic construct; identical to SEQ ID NO: 41810
  source 1..80: mol_type = other DNA

SEQ ID NO: 75595 - DNA, 80 bp, synthetic construct; identical to SEQ ID NO: 41811
  source 1..80: mol_type = other DNA

SEQ ID NO: 75596 - DNA, 80 bp, synthetic construct; identical to SEQ ID NO: 41812
  source 1..80: mol_type = other DNA

SEQ ID NO: 75597 - DNA, 80 bp, synthetic construct; identical to SEQ ID NO: 14326
  source 1..80: mol_type = other DNA

SEQ ID NO: 75598 - DNA, 80 bp, synthetic construct; identical to SEQ ID NO: 41814
  source 1..80: mol_type = other DNA

SEQ ID NO: 75599 - DNA, 80 bp, synthetic construct; identical to SEQ ID NO: 41815
  source 1..80: mol_type = other DNA

SEQ ID NO: 75600 - DNA, 80 bp, synthetic construct; identical to SEQ ID NO: 41816
  source 1..80: mol_type = other DNA

SEQ ID NO: 75601 - DNA, 80 bp, synthetic construct; identical to SEQ ID NO: 14327
  source 1..80: mol_type = other DNA

SEQ ID NO: 75602 - DNA, 80 bp, synthetic construct; identical to SEQ ID NO: 41818
  source 1..80: mol_type = other DNA

SEQ ID NO: 75603 - DNA, 80 bp, synthetic construct; identical to SEQ ID NO: 41819
  source 1..80: mol_type = other DNA

SEQ ID NO: 75604 - DNA, 80 bp, synthetic construct; identical to SEQ ID NO: 41820
  source 1..80: mol_type = other DNA

SEQ ID NO: 75605 - DNA, 80 bp, synthetic construct; identical to SEQ ID NO: 14328
  source 1..80: mol_type = other DNA

SEQ ID NO: 75606 - DNA, 80 bp, synthetic construct; identical to SEQ ID NO: 41822
  source 1..80: mol_type = other DNA

SEQ ID NO: 75607 - DNA, 80 bp, synthetic construct; identical to SEQ ID NO: 41823
  source 1..80: mol_type = other DNA

SEQ ID NO: 75608 - DNA, 80 bp, synthetic construct; identical to SEQ ID NO: 41824
  source 1..80: mol_type = other DNA

SEQ ID NO: 75609 - DNA, 80 bp, synthetic construct; identical to SEQ ID NO: 14329
  source 1..80: mol_type = other DNA

SEQ ID NO: 75610 - DNA, 80 bp, synthetic construct; identical to SEQ ID NO: 41826
  source 1..80: mol_type = other DNA

SEQ ID NO: 75611 - DNA, 80 bp, synthetic construct; identical to SEQ ID NO: 41827
  source 1..80: mol_type = other DNA

SEQ ID NO: 75612 - DNA, 80 bp, synthetic construct; identical to SEQ ID NO: 14330
  source 1..80: mol_type = other DNA

SEQ ID NO: 75613 - DNA, 80 bp, synthetic construct; identical to SEQ ID NO: 41829
  source 1..80: mol_type = other DNA

SEQ ID NO: 75614 - DNA, 80 bp, synthetic construct; identical to SEQ ID NO: 41830
  source 1..80: mol_type = other DNA

SEQ ID NO: 75615 - DNA, 80 bp, synthetic construct; identical to SEQ ID NO: 41831
  source 1..80: mol_type = other DNA

SEQ ID NO: 75616 - DNA, 80 bp, synthetic construct; identical to SEQ ID NO: 41832
  source 1..80: mol_type = other DNA

SEQ ID NO: 75617 - DNA, 80 bp, synthetic construct; identical to SEQ ID NO: 14331
  source 1..80: mol_type = other DNA

SEQ ID NO: 75618 - DNA, 80 bp, synthetic construct; identical to SEQ ID NO: 41834
  source 1..80: mol_type = other DNA

SEQ ID NO: 75619 - DNA, 80 bp, synthetic construct; identical to SEQ ID NO: 41835
  source 1..80: mol_type = other DNA

SEQ ID NO: 75620 - DNA, 80 bp, synthetic construct; identical to SEQ ID NO: 14332
  source 1..80: mol_type = other DNA

SEQ ID NO: 75621 - DNA, 80 bp, synthetic construct; identical to SEQ ID NO: 41837
  source 1..80: mol_type = other DNA

SEQ ID NO: 75622 - DNA, 80 bp, synthetic construct; identical to SEQ ID NO: 41838
  source 1..80: mol_type = other DNA

SEQ ID NO: 75623 - DNA, 80 bp, synthetic construct; identical to SEQ ID NO: 41839
  source 1..80: mol_type = other DNA

SEQ ID NO: 75624 - DNA, 80 bp, synthetic construct; identical to SEQ ID NO: 41840
  source 1..80: mol_type = other DNA

SEQ ID NO: 75625 - DNA, 80 bp, synthetic construct; identical to SEQ ID NO: 14333
  source 1..80: mol_type = other DNA

SEQ ID NO: 75626 - DNA, 80 bp, synthetic construct; identical to SEQ ID NO: 41842
  source 1..80: mol_type = other DNA

SEQ ID NO: 75627 - DNA, 80 bp, synthetic construct; identical to SEQ ID NO: 41843
  source 1..80: mol_type = other DNA

SEQ ID NO: 75628 - DNA, 80 bp, synthetic construct; identical to SEQ ID NO: 14334
  source 1..80: mol_type = other DNA

SEQ ID NO: 75629 - DNA, 80 bp, synthetic construct; identical to SEQ ID NO: 41845
  source 1..80: mol_type = other DNA

SEQ ID NO: 75630 - DNA, 80 bp, synthetic construct; identical to SEQ ID NO: 41846
  source 1..80: mol_type = other DNA

SEQ ID NO: 75631 - DNA, 80 bp, synthetic construct; identical to SEQ ID NO: 41847
  source 1..80: mol_type = other DNA

SEQ ID NO: 75632 - DNA, 80 bp, synthetic construct; identical to SEQ ID NO: 14335
  source 1..80: mol_type = other DNA

SEQ ID NO: 75633 - DNA, 80 bp, synthetic construct; identical to SEQ ID NO: 41849
  source 1..80: mol_type = other DNA

SEQ ID NO: 75634 - DNA, 80 bp, synthetic construct; identical to SEQ ID NO: 41850
  source 1..80: mol_type = other DNA

SEQ ID NO: 75635 - DNA, 80 bp, synthetic construct; identical to SEQ ID NO: 41851
  source 1..80: mol_type = other DNA

SEQ ID NO: 75636 - DNA, 80 bp, synthetic construct; identical to SEQ ID NO: 41852
  source 1..80: mol_type = other DNA

SEQ ID NO: 75637 - DNA, 80 bp, synthetic construct; identical to SEQ ID NO: 14336
  source 1..80: mol_type = other DNA

SEQ ID NO: 75638 - DNA, 80 bp, synthetic construct; identical to SEQ ID NO: 41854
  source 1..80: mol_type = other DNA

SEQ ID NO: 75639 - DNA, 80 bp, synthetic construct; identical to SEQ ID NO: 41855
  source 1..80: mol_type = other DNA

SEQ ID NO: 75640 - DNA, 80 bp, synthetic construct; identical to SEQ ID NO: 14337
  source 1..80: mol_type = other DNA

SEQ ID NO: 75641 - DNA, 80 bp, synthetic construct; identical to SEQ ID NO: 41857
  source 1..80: mol_type = other DNA

SEQ ID NO: 75642 - DNA, 80 bp, synthetic construct; identical to SEQ ID NO: 41858
  source 1..80: mol_type = other DNA

SEQ ID NO: 75643 - DNA, 80 bp, synthetic construct; identical to SEQ ID NO: 41859
  source 1..80: mol_type = other DNA

SEQ ID NO: 75644 - DNA, 80 bp, synthetic construct; identical to SEQ ID NO: 14338
  source 1..80: mol_type = other DNA

SEQ ID NO: 75645 - DNA, 80 bp, synthetic construct; identical to SEQ ID NO: 41861
  source 1..80: mol_type = other DNA

SEQ ID NO: 75646 - DNA, 80 bp, synthetic construct; identical to SEQ ID NO: 41862
  source 1..80: mol_type = other DNA

SEQ ID NO: 75647 - DNA, 80 bp, synthetic construct; identical to SEQ ID NO: 41863
  source 1..80: mol_type = other DNA

SEQ ID NO: 75648 - DNA, 80 bp, synthetic construct; identical to SEQ ID NO: 41864
  source 1..80: mol_type = other DNA

SEQ ID NO: 75649 - DNA, 80 bp, synthetic construct; identical to SEQ ID NO: 14339
  source 1..80: mol_type = other DNA

SEQ ID NO: 75650 - DNA, 80 bp, synthetic construct; identical to SEQ ID NO: 41866
  source 1..80: mol_type = other DNA

SEQ ID NO: 75651 - DNA, 80 bp, synthetic construct; identical to SEQ ID NO: 41867
  source 1..80: mol_type = other DNA

SEQ ID NO: 75652 - DNA, 80 bp, synthetic construct; identical to SEQ ID NO: 14340
  source 1..80: mol_type = other DNA

SEQ ID NO: 75653 - DNA, 80 bp, synthetic construct; identical to SEQ ID NO: 41869
  source 1..80: mol_type = other DNA

SEQ ID NO: 75654 - DNA, 80 bp, synthetic construct; identical to SEQ ID NO: 41870
  source 1..80: mol_type = other DNA

SEQ ID NO: 75655 - DNA, 80 bp, synthetic construct; identical to SEQ ID NO: 41871
  source 1..80: mol_type = other DNA

SEQ ID NO: 75656 - DNA, 80 bp, synthetic construct; identical to SEQ ID NO: 41872
  source 1..80: mol_type = other DNA

SEQ ID NO: 75657 - DNA, 80 bp, synthetic construct; identical to SEQ ID NO: 14341
  source 1..80: mol_type = other DNA

SEQ ID NO: 75658 - DNA, 80 bp, synthetic construct; identical to SEQ ID NO: 41874
  source 1..80: mol_type = other DNA

SEQ ID NO: 75659 - DNA, 80 bp, synthetic construct; identical to SEQ ID NO: 41875
  source 1..80: mol_type = other DNA

SEQ ID NO: 75660 - DNA, 80 bp, synthetic construct; identical to SEQ ID NO: 14342
  source 1..80: mol_type = other DNA

SEQ ID NO: 75661 - DNA, 80 bp, synthetic construct; identical to SEQ ID NO: 41877
  source 1..80: mol_type = other DNA

SEQ ID NO: 75662 - DNA, 80 bp, synthetic construct; identical to SEQ ID NO: 41878
  source 1..80: mol_type = other DNA

SEQ ID NO: 75663 - DNA, 80 bp, synthetic construct; identical to SEQ ID NO: 41879
  source 1..80: mol_type = other DNA

SEQ ID NO: 75664 - DNA, 80 bp, synthetic construct; identical to SEQ ID NO: 14343
  source 1..80: mol_type = other DNA

SEQ ID NO: 75665 - DNA, 80 bp, synthetic construct; identical to SEQ ID NO: 41881
  source 1..80: mol_type = other DNA

SEQ ID NO: 75666 - DNA, 80 bp, synthetic construct; identical to SEQ ID NO: 41882
  source 1..80: mol_type = other DNA

SEQ ID NO: 75667 - DNA, 80 bp, synthetic construct; identical to SEQ ID NO: 41883
  source 1..80: mol_type = other DNA

SEQ ID NO: 75668 - DNA, 80 bp, synthetic construct; identical to SEQ ID NO: 14344
  source 1..80: mol_type = other DNA

SEQ ID NO: 75669 - DNA, 80 bp, synthetic construct; identical to SEQ ID NO: 41885
  source 1..80: mol_type = other DNA

SEQ ID NO: 75670 - DNA, 80 bp, synthetic construct; identical to SEQ ID NO: 41886
  source 1..80: mol_type = other DNA

SEQ ID NO: 75671 - DNA, 80 bp, synthetic construct; identical to SEQ ID NO: 14345
  source 1..80: mol_type = other DNA

SEQ ID NO: 75672 - DNA, 80 bp, synthetic construct; identical to SEQ ID NO: 41888
  source 1..80: mol_type = other DNA

SEQ ID NO: 75673 - DNA, 80 bp, synthetic construct; identical to SEQ ID NO: 41889
  source 1..80: mol_type = other DNA

SEQ ID NO: 75674 - DNA, 80 bp, synthetic construct; identical to SEQ ID NO: 41890
  source 1..80: mol_type = other DNA

SEQ ID NO: 75675 - DNA, 80 bp, synthetic construct; identical to SEQ ID NO: 14346
  source 1..80: mol_type = other DNA

SEQ ID NO: 75676 - DNA, 80 bp, synthetic construct; identical to SEQ ID NO: 41892
  source 1..80: mol_type = other DNA

SEQ ID NO: 75677 - DNA, 80 bp, synthetic construct; identical to SEQ ID NO: 41893
  source 1..80: mol_type = other DNA

SEQ ID NO: 75678 - DNA, 80 bp, synthetic construct; identical to SEQ ID NO: 41894
  source 1..80: mol_type = other DNA

SEQ ID NO: 75679 - DNA, 80 bp, synthetic construct; identical to SEQ ID NO: 41895
  source 1..80: mol_type = other DNA

SEQ ID NO: 75680 - DNA, 80 bp, synthetic construct; identical to SEQ ID NO: 14347
  source 1..80: mol_type = other DNA

SEQ ID NO: 75681 - DNA, 80 bp, synthetic construct; identical to SEQ ID NO: 41897
  source 1..80: mol_type = other DNA

SEQ ID NO: 75682 - DNA, 80 bp, synthetic construct; identical to SEQ ID NO: 41898
  source 1..80: mol_type = other DNA

SEQ ID NO: 75683 - DNA, 80 bp, synthetic construct; identical to SEQ ID NO: 14348
  source 1..80: mol_type = other DNA

SEQ ID NO: 75684 - DNA, 80 bp, synthetic construct; identical to SEQ ID NO: 41900
  source 1..80: mol_type = other DNA

SEQ ID NO: 75685 - DNA, 80 bp, synthetic construct; identical to SEQ ID NO: 41901
  source 1..80: mol_type = other DNA

SEQ ID NO: 75686 - DNA, 80 bp, synthetic construct; identical to SEQ ID NO: 41902
  source 1..80: mol_type = other DNA

SEQ ID NO: 75687 - DNA, 80 bp, synthetic construct; identical to SEQ ID NO: 14349
  source 1..80: mol_type = other DNA

SEQ ID NO: 75688 - DNA, 80 bp, synthetic construct; identical to SEQ ID NO: 41904
  source 1..80: mol_type = other DNA

SEQ ID NO: 75689 - DNA, 80 bp, synthetic construct; identical to SEQ ID NO: 41905
  source 1..80: mol_type = other DNA

SEQ ID NO: 75690 - DNA, 80 bp, synthetic construct; identical to SEQ ID NO: 41906
  source 1..80: mol_type = other DNA

SEQ ID NO: 75691 - DNA, 80 bp, synthetic construct; identical to SEQ ID NO: 14350
  source 1..80: mol_type = other DNA

SEQ ID NO: 75692 - DNA, 80 bp, synthetic construct; identical to SEQ ID NO: 41908
  source 1..80: mol_type = other DNA

SEQ ID NO: 75693 - DNA, 80 bp, synthetic construct; identical to SEQ ID NO: 41909
  source 1..80: mol_type = other DNA

SEQ ID NO: 75694 - DNA, 80 bp, synthetic construct; identical to SEQ ID NO: 41910
  source 1..80: mol_type = other DNA

SEQ ID NO: 75695 - DNA, 80 bp, synthetic construct; identical to SEQ ID NO: 41911
  source 1..80: mol_type = other DNA

SEQ ID NO: 75696 - DNA, 80 bp, synthetic construct; identical to SEQ ID NO: 14351
  source 1..80: mol_type = other DNA

SEQ ID NO: 75697 - DNA, 80 bp, synthetic construct; identical to SEQ ID NO: 41913
  source 1..80: mol_type = other DNA

SEQ ID NO: 75698 - DNA, 80 bp, synthetic construct; identical to SEQ ID NO: 41914
  source 1..80: mol_type = other DNA

SEQ ID NO: 75699 - DNA, 80 bp, synthetic construct; identical to SEQ ID NO: 41915
  source 1..80: mol_type = other DNA

SEQ ID NO: 75700 - DNA, 80 bp, synthetic construct; identical to SEQ ID NO: 14352
  source 1..80: mol_type = other DNA

SEQ ID NO: 75701 - DNA, 80 bp, synthetic construct; identical to SEQ ID NO: 41917
  source 1..80: mol_type = other DNA

SEQ ID NO: 75702 - DNA, 80 bp, synthetic construct; identical to SEQ ID NO: 41918
  source 1..80: mol_type = other DNA

SEQ ID NO: 75703 - DNA, 80 bp, synthetic construct; identical to SEQ ID NO: 41919
  source 1..80: mol_type = other DNA

SEQ ID NO: 75704 - DNA, 80 bp, synthetic construct; identical to SEQ ID NO: 14353
  source 1..80: mol_type = other DNA

SEQ ID NO: 75705 - DNA, 80 bp, synthetic construct; identical to SEQ ID NO: 41921
  source 1..80: mol_type = other DNA

SEQ ID NO: 75706 - DNA, 80 bp, synthetic construct; identical to SEQ ID NO: 41922
  source 1..80: mol_type = other DNA

SEQ ID NO: 75707 - DNA, 80 bp, synthetic construct; identical to SEQ ID NO: 14354
  source 1..80: mol_type = other DNA

SEQ ID NO: 75708 - DNA, 80 bp, synthetic construct; identical to SEQ ID NO: 41924
  source 1..80: mol_type = other DNA

SEQ ID NO: 75709 - DNA, 80 bp, synthetic construct; identical to SEQ ID NO: 41925
  source 1..80: mol_type = other DNA

SEQ ID NO: 75710 - DNA, 80 bp, synthetic construct; identical to SEQ ID NO: 41927
  source 1..80: mol_type = other DNA

SEQ ID NO: 75711 - DNA, 80 bp, synthetic construct; identical to SEQ ID NO: 14355
  source 1..80: mol_type = other DNA

SEQ ID NO: 75712 - DNA, 80 bp, synthetic construct; identical to SEQ ID NO: 41930
  source 1..80: mol_type = other DNA

SEQ ID NO: 75713 - DNA, 80 bp, synthetic construct; identical to SEQ ID NO: 14356
  source 1..80: mol_type = other DNA

SEQ ID NO: 75714 - DNA, 80 bp, synthetic construct; identical to SEQ ID NO: 41932
  source 1..80: mol_type = other DNA

SEQ ID NO: 75715 - DNA, 80 bp, synthetic construct; identical to SEQ ID NO: 41933
  source 1..80: mol_type = other DNA

SEQ ID NO: 75716 - DNA, 80 bp, synthetic construct; identical to SEQ ID NO: 41934
  source 1..80: mol_type = other DNA

SEQ ID NO: 75717 - DNA, 80 bp, synthetic construct; identical to SEQ ID NO: 41935
  source 1..80: mol_type = other DNA

SEQ ID NO: 75718 - DNA, 80 bp, synthetic construct; identical to SEQ ID NO: 14357
  source 1..80: mol_type = other DNA

SEQ ID NO: 75719 - DNA, 80 bp, synthetic construct; identical to SEQ ID NO: 41937
  source 1..80: mol_type = other DNA

SEQ ID NO: 75720 - DNA, 80 bp, synthetic construct; identical to SEQ ID NO: 41938
  source 1..80: mol_type = other DNA

SEQ ID NO: 75721 - DNA, 80 bp, synthetic construct; identical to SEQ ID NO: 14358
  source 1..80: mol_type = other DNA

SEQ ID NO: 75722 - DNA, 80 bp, synthetic construct; identical to SEQ ID NO: 41940
  source 1..80: mol_type = other DNA

SEQ ID NO: 75723 - DNA, 80 bp, synthetic construct; identical to SEQ ID NO: 41941
  source 1..80: mol_type = other DNA

SEQ ID NO: 75724 - DNA, 80 bp, synthetic construct; identical to SEQ ID NO: 41942
  source 1..80: mol_type = other DNA

SEQ ID NO: 75725 - DNA, 80 bp, synthetic construct; identical to SEQ ID NO: 14359
  source 1..80: mol_type = other DNA

SEQ ID NO: 75726 - DNA, 80 bp, synthetic construct; identical to SEQ ID NO: 41945
  source 1..80: mol_type = other DNA

SEQ ID NO: 75727 - DNA, 80 bp, synthetic construct; identical to SEQ ID NO: 41946
  source 1..80: mol_type = other DNA

SEQ ID NO: 75728 - DNA, 80 bp, synthetic construct; identical to SEQ ID NO: 41947
  source 1..80: mol_type = other DNA

SEQ ID NO: 75729 - DNA, 80 bp, synthetic construct; identical to SEQ ID NO: 14360
  source 1..80: mol_type = other DNA

SEQ ID NO: 75730 - DNA, 80 bp, synthetic construct; identical to SEQ ID NO: 41949
  source 1..80: mol_type = other DNA

SEQ ID NO: 75731 - DNA, 80 bp, synthetic construct; identical to SEQ ID NO: 14361
  source 1..80: mol_type = other DNA

SEQ ID NO: 75732 - DNA, 80 bp, synthetic construct; identical to SEQ ID NO: 41953
  source 1..80: mol_type = other DNA

SEQ ID NO: 75733 - DNA, 80 bp, synthetic construct; identical to SEQ ID NO: 41954
  source 1..80: mol_type = other DNA

SEQ ID NO: 75734 - DNA, 80 bp, synthetic construct; identical to SEQ ID NO: 41955
  source 1..80: mol_type = other DNA

SEQ ID NO: 75735 - DNA, 80 bp, synthetic construct; identical to SEQ ID NO: 14362
  source 1..80: mol_type = other DNA

SEQ ID NO: 75736 - DNA, 80 bp, synthetic construct; identical to SEQ ID NO: 41957
  source 1..80: mol_type = other DNA

SEQ ID NO: 75737 - DNA, 80 bp, synthetic construct; identical to SEQ ID NO: 41958
  source 1..80: mol_type = other DNA

SEQ ID NO: 75738 - DNA, 80 bp, synthetic construct; identical to SEQ ID NO: 41959
  source 1..80: mol_type = other DNA

SEQ ID NO: 75739 - DNA, 80 bp, synthetic construct; identical to SEQ ID NO: 14363
  source 1..80: mol_type = other DNA

SEQ ID NO: 75740 - DNA, 80 bp, synthetic construct; identical to SEQ ID NO: 41961
  source 1..80: mol_type = other DNA

SEQ ID NO: 75741 - DNA, 80 bp, synthetic construct; identical to SEQ ID NO: 41962
  source 1..80: mol_type = other DNA

SEQ ID NO: 75742 - DNA, 80 bp, synthetic construct; identical to SEQ ID NO: 41963
  source 1..80: mol_type = other DNA

SEQ ID NO: 75743 - DNA, 80 bp, synthetic construct; identical to SEQ ID NO: 14364
  source 1..80: mol_type = other DNA

SEQ ID NO: 75744 - DNA, 80 bp, synthetic construct; identical to SEQ ID NO: 41965
  source 1..80: mol_type = other DNA

SEQ ID NO: 75745 - DNA, 80 bp, synthetic construct; identical to SEQ ID NO: 41966
  source 1..80: mol_type = other DNA

SEQ ID NO: 75746 - DNA, 80 bp, synthetic construct; identical to SEQ ID NO: 14365
  source 1..80: mol_type = other DNA

SEQ ID NO: 75747 - DNA, 80 bp, synthetic construct; identical to SEQ ID NO: 41968
  source 1..80: mol_type = other DNA

SEQ ID NO: 75748 - DNA, 80 bp, synthetic construct; identical to SEQ ID NO: 41969
  source 1..80: mol_type = other DNA

SEQ ID NO: 75749 - DNA, 80 bp, synthetic construct; identical to SEQ ID NO: 41970
  source 1..80: mol_type = other DNA

SEQ ID NO: 75750 - DNA, 80 bp, synthetic construct; identical to SEQ ID NO: 41971
  source 1..80: mol_type = other DNA

SEQ ID NO: 75751 - DNA, 80 bp, synthetic construct; identical to SEQ ID NO: 14366
  source 1..80: mol_type = other DNA

SEQ ID NO: 75752 - DNA, 80 bp, synthetic construct; identical to SEQ ID NO: 41973
  source 1..80: mol_type = other DNA

SEQ ID NO: 75753 - DNA, 80 bp, synthetic construct; identical to SEQ ID NO: 41974
  source 1..80: mol_type = other DNA

SEQ ID NO: 75754 - DNA, 80 bp, synthetic construct; identical to SEQ ID NO: 41975
  source 1..80: mol_type = other DNA

SEQ ID NO: 75755 - DNA, 80 bp, synthetic construct; identical to SEQ ID NO: 14367
  source 1..80: mol_type = other DNA

SEQ ID NO: 75756 - DNA, 80 bp, synthetic construct; identical to SEQ ID NO: 41978
  source 1..80: mol_type = other DNA

SEQ ID NO: 75757 - DNA, 80 bp, synthetic construct; identical to SEQ ID NO: 41979
  source 1..80: mol_type = other DNA

SEQ ID NO: 75758 - DNA, 80 bp, synthetic construct; identical to SEQ ID NO: 41980
  source 1..80: mol_type = other DNA

SEQ ID NO: 75759 - DNA, 80 bp, synthetic construct; identical to SEQ ID NO: 41981
  source 1..80: mol_type = other DNA

SEQ ID NO: 75760 - DNA, 80 bp, synthetic construct; identical to SEQ ID NO: 14368
  source 1..80: mol_type = other DNA

SEQ ID NO: 75761 - DNA, 80 bp, synthetic construct; identical to SEQ ID NO: 41983
  source 1..80: mol_type = other DNA

SEQ ID NO: 75762 - DNA, 80 bp, synthetic construct; identical to SEQ ID NO: 41984
  source 1..80: mol_type = other DNA

SEQ ID NO: 75763 - DNA, 80 bp, synthetic construct; identical to SEQ ID NO: 14369
  source 1..80: mol_type = other DNA

SEQ ID NO: 75764 - DNA, 80 bp, synthetic construct; identical to SEQ ID NO: 41986
  source 1..80: mol_type = other DNA

SEQ ID NO: 75765 - DNA, 80 bp, synthetic construct; identical to SEQ ID NO: 41987
  source 1..80: mol_type = other DNA

SEQ ID NO: 75766 - DNA, 80 bp, synthetic construct; identical to SEQ ID NO: 41988
  source 1..80: mol_type = other DNA

SEQ ID NO: 75767 - DNA, 80 bp, synthetic construct; identical to SEQ ID NO: 14370
  source 1..80: mol_type = other DNA

SEQ ID NO: 75768 - DNA, 80 bp, synthetic construct; identical to SEQ ID NO: 41990
  source 1..80: mol_type = other DNA

SEQ ID NO: 75769 - DNA, 80 bp, synthetic construct; identical to SEQ ID NO: 41991
  source 1..80: mol_type = other DNA

SEQ ID NO: 75770 - DNA, 80 bp, synthetic construct; identical to SEQ ID NO: 41992
  source 1..80: mol_type = other DNA

SEQ ID NO: 75771 - DNA, 80 bp, synthetic construct; identical to SEQ ID NO: 14371
  source 1..80: mol_type = other DNA

SEQ ID NO: 75772 - DNA, 80 bp, synthetic construct; identical to SEQ ID NO: 41994
  source 1..80: mol_type = other DNA

SEQ ID NO: 75773 - DNA, 80 bp, synthetic construct; identical to SEQ ID NO: 41995
  source 1..80: mol_type = other DNA

SEQ ID NO: 75774 - DNA, 80 bp, synthetic construct; identical to SEQ ID NO: 41996
  source 1..80: mol_type = other DNA

SEQ ID NO: 75775 - DNA, 80 bp, synthetic construct; identical to SEQ ID NO: 41997
  source 1..80: mol_type = other DNA

SEQ ID NO: 75776 - DNA, 80 bp, synthetic construct; identical to SEQ ID NO: 41998
  source 1..80: mol_type = other DNA

SEQ ID NO: 75777 - DNA, 80 bp, synthetic construct; identical to SEQ ID NO: 41999
  source 1..80: mol_type = other DNA

SEQ ID NO: 75778 - DNA, 80 bp, synthetic construct; identical to SEQ ID NO: 42000
  source 1..80: mol_type = other DNA

SEQ ID NO: 75779 - DNA, 80 bp, synthetic construct; identical to SEQ ID NO: 14373
  source 1..80: mol_type = other DNA

SEQ ID NO: 75780 - DNA, 80 bp, synthetic construct; identical to SEQ ID NO: 42002
  source 1..80: mol_type = other DNA

SEQ ID NO: 75781 - DNA, 80 bp, synthetic construct; identical to SEQ ID NO: 42003
  source 1..80: mol_type = other DNA

SEQ ID NO: 75782 - DNA, 80 bp, synthetic construct; identical to SEQ ID NO: 42004
  source 1..80: mol_type = other DNA

SEQ ID NO: 75783 - DNA, 80 bp, synthetic construct; identical to SEQ ID NO: 14374
  source 1..80: mol_type = other DNA

SEQ ID NO: 75784 - DNA, 80 bp, synthetic construct; identical to SEQ ID NO: 42006
  source 1..80: mol_type = other DNA

SEQ ID NO: 75785 - DNA, 80 bp, synthetic construct; identical to SEQ ID NO: 42007
  source 1..80: mol_type = other DNA

SEQ ID NO: 75786 - DNA, 80 bp, synthetic construct; identical to SEQ ID NO: 42008
  source 1..80: mol_type = other DNA

SEQ ID NO: 75787 - DNA, 80 bp, synthetic construct; identical to SEQ ID NO: 14375
  source 1..80: mol_type = other DNA

SEQ ID NO: 75788 - DNA, 80 bp, synthetic construct; identical to SEQ ID NO: 42010
  source 1..80: mol_type = other DNA

SEQ ID NO: 75789 - DNA, 80 bp, synthetic construct; identical to SEQ ID NO: 42011
  source 1..80: mol_type = other DNA

SEQ ID NO: 75790 - DNA, 80 bp, synthetic construct; identical to SEQ ID NO: 42012
  source 1..80: mol_type = other DNA

SEQ ID NO: 75791 - DNA, 80 bp, synthetic construct; identical to SEQ ID NO: 42013
  source 1..80: mol_type = other DNA

SEQ ID NO: 75792 - DNA, 80 bp, synthetic construct; identical to SEQ ID NO: 42014
  source 1..80: mol_type = other DNA

SEQ ID NO: 75793 - DNA, 80 bp, synthetic construct; identical to SEQ ID NO: 14376
  source 1..80: mol_type = other DNA

SEQ ID NO: 75794 - DNA, 80 bp, synthetic construct; identical to SEQ ID NO: 42016
  source 1..80: mol_type = other DNA

SEQ ID NO: 75795 - DNA, 80 bp, synthetic construct; identical to SEQ ID NO: 42017
  source 1..80: mol_type = other DNA

SEQ ID NO: 75796 - DNA, 80 bp, synthetic construct; identical to SEQ ID NO: 42018
  source 1..80: mol_type = other DNA

SEQ ID NO: 75797 - DNA, 80 bp, synthetic construct; identical to SEQ ID NO: 42019
  source 1..80: mol_type = other DNA

SEQ ID NO: 75798 - DNA, 80 bp, synthetic construct; identical to SEQ ID NO: 14377
  source 1..80: mol_type = other DNA

SEQ ID NO: 75799 - DNA, 80 bp, synthetic construct; identical to SEQ ID NO: 42021
  source 1..80: mol_type = other DNA

SEQ ID NO: 75800 - DNA, 80 bp, synthetic construct; identical to SEQ ID NO: 42022
  source 1..80: mol_type = other DNA

SEQ ID NO: 75801 - DNA, 80 bp, synthetic construct; identical to SEQ ID NO: 42023
  source 1..80: mol_type = other DNA

SEQ ID NO: 75802 - DNA, 80 bp, synthetic construct; identical to SEQ ID NO: 14372
  source 1..80: mol_type = other DNA

SEQ ID NO: 75803 - DNA, 80 bp, synthetic construct; identical to SEQ ID NO: 42025
  source 1..80: mol_type = other DNA

SEQ ID NO: 75804 - DNA, 80 bp, synthetic construct; identical to SEQ ID NO: 42026
  source 1..80: mol_type = other DNA

SEQ ID NO: 75805 - DNA, 80 bp, synthetic construct; identical to SEQ ID NO: 14379
  source 1..80: mol_type = other DNA

SEQ ID NO: 75806 - DNA, 80 bp, synthetic construct; identical to SEQ ID NO: 42028
  source 1..80: mol_type = other DNA

SEQ ID NO: 75807 - DNA, 80 bp, synthetic construct; identical to SEQ ID NO: 14394
  source 1..80: mol_type = other DNA

SEQ ID NO: 75808 - DNA, 80 bp, synthetic construct; identical to SEQ ID NO: 42030
  source 1..80: mol_type = other DNA

SEQ ID NO: 75809 - DNA, 80 bp, synthetic construct; identical to SEQ ID NO: 14380
  source 1..80: mol_type = other DNA

SEQ ID NO: 75810 - DNA, 80 bp, synthetic construct; identical to SEQ ID NO: 42032
  source 1..80: mol_type = other DNA

SEQ ID NO: 75811 - DNA, 80 bp, synthetic construct; identical to SEQ ID NO: 42033
  source 1..80: mol_type = other DNA

SEQ ID NO: 75812 - DNA, 80 bp, synthetic construct; identical to SEQ ID NO: 42034
  source 1..80: mol_type = other DNA

SEQ ID NO: 75813 - DNA, 80 bp, synthetic construct; identical to SEQ ID NO: 42035
  source 1..80: mol_type = other DNA

SEQ ID NO: 75814 - DNA, 80 bp, synthetic construct; identical to SEQ ID NO: 14381
  source 1..80: mol_type = other DNA

SEQ ID NO: 75815 - DNA, 80 bp, synthetic construct; identical to SEQ ID NO: 42037
  source 1..80: mol_type = other DNA

SEQ ID NO: 75816 - DNA, 80 bp, synthetic construct; identical to SEQ ID NO: 42038
  source 1..80: mol_type = other DNA

SEQ ID NO: 75817 - DNA, 80 bp, synthetic construct; identical to SEQ ID NO: 14382
  source 1..80: mol_type = other DNA

SEQ ID NO: 75818 - DNA, 80 bp, synthetic construct; identical to SEQ ID NO: 42040
  source 1..80: mol_type = other DNA

SEQ ID NO: 75819 - DNA, 80 bp, synthetic construct; identical to SEQ ID NO: 42042
  source 1..80: mol_type = other DNA

SEQ ID NO: 75820 - DNA, 80 bp, synthetic construct; identical to SEQ ID NO: 42044
  source 1..80: mol_type = other DNA

SEQ ID NO: 75821 - DNA, 80 bp, synthetic construct; identical to SEQ ID NO: 42045
  source 1..80: mol_type = other DNA

SEQ ID NO: 75822 - DNA, 80 bp, synthetic construct; identical to SEQ ID NO: 42046
  source 1..80: mol_type = other DNA

SEQ ID NO: 75823 - DNA, 80 bp, synthetic construct; identical to SEQ ID NO: 14384
  source 1..80: mol_type = other DNA

SEQ ID NO: 75824 - DNA, 80 bp, synthetic construct; identical to SEQ ID NO: 42048
  source 1..80: mol_type = other DNA

SEQ ID NO: 75825 - DNA, 80 bp, synthetic construct; identical to SEQ ID NO: 42049
  source 1..80: mol_type = other DNA

SEQ ID NO: 75826 - DNA, 80 bp, synthetic construct; identical to SEQ ID NO: 14385
  source 1..80: mol_type = other DNA

SEQ ID NO: 75827 - DNA, 80 bp, synthetic construct; identical to SEQ ID NO: 42051
  source 1..80: mol_type = other DNA

SEQ ID NO: 75828 - DNA, 80 bp, synthetic construct; identical to SEQ ID NO: 42052
  source 1..80: mol_type = other DNA

SEQ ID NO: 75829 - DNA, 80 bp, synthetic construct; identical to SEQ ID NO: 42053
  source 1..80: mol_type = other DNA

SEQ ID NO: 75830 - DNA, 80 bp, synthetic construct; identical to SEQ ID NO: 42054
  source 1..80: mol_type = other DNA

SEQ ID NO: 75831 - DNA, 80 bp, synthetic construct; identical to SEQ ID NO: 14386
  source 1..80: mol_type = other DNA

SEQ ID NO: 75832 - DNA, 80 bp, synthetic construct; identical to SEQ ID NO: 42056
  source 1..80: mol_type = other DNA

SEQ ID NO: 75833 - DNA, 80 bp, synthetic construct; identical to SEQ ID NO: 42057
  source 1..80: mol_type = other DNA

SEQ ID NO: 75834 - DNA, 80 bp, synthetic construct; identical to SEQ ID NO: 14387
  source 1..80: mol_type = other DNA

SEQ ID NO: 75835 - DNA, 80 bp, synthetic construct; identical to SEQ ID NO: 42059
  source 1..80: mol_type = other DNA

SEQ ID NO: 75836 - DNA, 80 bp, synthetic construct; identical to SEQ ID NO: 42060
  source 1..80: mol_type = other DNA

SEQ ID NO: 75837 - DNA, 80 bp, synthetic construct; identical to SEQ ID NO: 42061
  source 1..80: mol_type = other DNA

SEQ ID NO: 75838 - DNA, 80 bp, synthetic construct; identical to SEQ ID NO: 42062
  source 1..80: mol_type = other DNA

SEQ ID NO: 75839 - DNA, 80 bp, synthetic construct; identical to SEQ ID NO: 14388
  source 1..80: mol_type = other DNA

SEQ ID NO: 75840 - DNA, 80 bp, synthetic construct; identical to SEQ ID NO: 42064
  source 1..80: mol_type = other DNA

SEQ ID NO: 75841 - DNA, 80 bp, synthetic construct; identical to SEQ ID NO: 42065
  source 1..80: mol_type = other DNA

SEQ ID NO: 75842 - DNA, 80 bp, synthetic construct; identical to SEQ ID NO: 14389
  source 1..80: mol_type = other DNA

SEQ ID NO: 75843 - DNA, 80 bp, synthetic construct; identical to SEQ ID NO: 42067
  source 1..80: mol_type = other DNA

SEQ ID NO: 75844 - DNA, 80 bp, synthetic construct; identical to SEQ ID NO: 14390
  source 1..80: mol_type = other DNA

SEQ ID NO: 75845 - DNA, 80 bp, synthetic construct; identical to SEQ ID NO: 42069
  source 1..80: mol_type = other DNA

SEQ ID NO: 75846 - DNA, 80 bp, synthetic construct; identical to SEQ ID NO: 42070
  source 1..80: mol_type = other DNA

SEQ ID NO: 75847 - DNA, 80 bp, synthetic construct; identical to SEQ ID NO: 42071
  source 1..80: mol_type = other DNA

SEQ ID NO: 75848 - DNA, 80 bp, synthetic construct; identical to SEQ ID NO: 42072
  source 1..80: mol_type = other DNA

SEQ ID NO: 75849 - DNA, 80 bp, synthetic construct; identical to SEQ ID NO: 14391
  source 1..80: mol_type = other DNA

SEQ ID NO: 75850 - DNA, 80 bp, synthetic construct; identical to SEQ ID NO: 42074
  source 1..80: mol_type = other DNA

SEQ ID NO: 75851 - DNA, 80 bp, synthetic construct; identical to SEQ ID NO: 42075
  source 1..80: mol_type = other DNA

SEQ ID NO: 75852 - DNA, 80 bp, synthetic construct; identical to SEQ ID NO: 14392
  source 1..80: mol_type = other DNA

SEQ ID NO: 75853 - DNA, 80 bp, synthetic construct; identical to SEQ ID NO: 42077
  source 1..80: mol_type = other DNA

SEQ ID NO: 75854 - DNA, 80 bp, synthetic construct; identical to SEQ ID NO: 42078
  source 1..80: mol_type = other DNA

SEQ ID NO: 75855 - DNA, 80 bp, synthetic construct; identical to SEQ ID NO: 42079
  source 1..80: mol_type = other DNA

SEQ ID NO: 75856 - DNA, 80 bp, synthetic construct; identical to SEQ ID NO: 14393
  source 1..80: mol_type = other DNA

SEQ ID NO: 75857 - DNA, 80 bp, synthetic construct; identical to SEQ ID NO: 42081
  source 1..80: mol_type = other DNA

SEQ ID NO: 75858 - DNA, 80 bp, synthetic construct; identical to SEQ ID NO: 42082
  source 1..80: mol_type = other DNA

SEQ ID NO: 75859 - DNA, 80 bp, synthetic construct; identical to SEQ ID NO: 42083
  source 1..80: mol_type = other DNA

SEQ ID NO: 75860 - DNA, 80 bp, synthetic construct; identical to SEQ ID NO: 42084
  source 1..80: mol_type = other DNA

SEQ ID NO: 75861 - DNA, 80 bp, synthetic construct; identical to SEQ ID NO: 42085
  source 1..80: mol_type = other DNA

SEQ ID NO: 75862 - DNA, 80 bp, synthetic construct; identical to SEQ ID NO: 14395
  source 1..80: mol_type = other DNA

SEQ ID NO: 75863 - DNA, 80 bp, synthetic construct; identical to SEQ ID NO: 42087
  source 1..80: mol_type = other DNA

SEQ ID NO: 75864 - DNA, 80 bp, synthetic construct; identical to SEQ ID NO: 14396
  source 1..80: mol_type = other DNA

SEQ ID NO: 75865 - DNA, 80 bp, synthetic construct; identical to SEQ ID NO: 42090
  source 1..80: mol_type = other DNA

SEQ ID NO: 75866 - DNA, 80 bp, synthetic construct; identical to SEQ ID NO: 14397
  source 1..80: mol_type = other DNA

SEQ ID NO: 75867 - DNA, 80 bp, synthetic construct; identical to SEQ ID NO: 42092
  source 1..80: mol_type = other DNA

SEQ ID NO: 75868 - DNA, 80 bp, synthetic construct; identical to SEQ ID NO: 42093
  source 1..80: mol_type = other DNA

SEQ ID NO: 75869 - DNA, 80 bp, synthetic construct; identical to SEQ ID NO: 42094
  source 1..80: mol_type = other DNA

SEQ ID NO: 75870 - DNA, 80 bp, synthetic construct; identical to SEQ ID NO: 42095
  source 1..80: mol_type = other DNA

SEQ ID NO: 75871 - DNA, 80 bp, synthetic construct; identical to SEQ ID NO: 14398
  source 1..80: mol_type = other DNA

SEQ ID NO: 75872 - DNA, 80 bp, synthetic construct; identical to SEQ ID NO: 42097
  source 1..80: mol_type = other DNA

SEQ ID NO: 75873 - DNA, 80 bp, synthetic construct; identical to SEQ ID NO: 42098
  source 1..80: mol_type = other DNA

SEQ ID NO: 75874 - DNA, 80 bp, synthetic construct; identical to SEQ ID NO: 42099
  source 1..80: mol_type = other DNA

SEQ ID NO: 75875 - DNA, 80 bp, synthetic construct; identical to SEQ ID NO: 14399
  source 1..80: mol_type = other DNA

SEQ ID NO: 75876 - DNA, 80 bp, synthetic construct; identical to SEQ ID NO: 42101
  source 1..80: mol_type = other DNA

SEQ ID NO: 75877 - DNA, 80 bp, synthetic construct; identical to SEQ ID NO: 42102
  source 1..80: mol_type = other DNA

SEQ ID NO: 75878 - DNA, 80 bp, synthetic construct; identical to SEQ ID NO: 42103
  source 1..80: mol_type = other DNA

SEQ ID NO: 75879 - DNA, 80 bp, synthetic construct; identical to SEQ ID NO: 14400
  source 1..80: mol_type = other DNA

SEQ ID NO: 75880 - DNA, 80 bp, synthetic construct; identical to SEQ ID NO: 42105
  source 1..80: mol_type = other DNA

SEQ ID NO: 75881 - DNA, 80 bp, synthetic construct; identical to SEQ ID NO: 42106
  source 1..80: mol_type = other DNA

SEQ ID NO: 75882 - DNA, 80 bp, synthetic construct; identical to SEQ ID NO: 42107
  source 1..80: mol_type = other DNA

SEQ ID NO: 75883 - DNA, 80 bp, synthetic construct; identical to SEQ ID NO: 14401
  source 1..80: mol_type = other DNA

SEQ ID NO: 75884 - DNA, 80 bp, synthetic construct; identical to SEQ ID NO: 42109
  source 1..80: mol_type = other DNA

SEQ ID NO: 75885 - DNA, 80 bp, synthetic construct; identical to SEQ ID NO: 42110
  source 1..80: mol_type = other DNA

SEQ ID NO: 75886 - DNA, 80 bp, synthetic construct; identical to SEQ ID NO: 42111
  source 1..80: mol_type = other DNA

SEQ ID NO: 75887 - DNA, 80 bp, synthetic construct; identical to SEQ ID NO: 14402
  source 1..80: mol_type = other DNA

SEQ ID NO: 75888 - DNA, 80 bp, synthetic construct; identical to SEQ ID NO: 42113
  source 1..80: mol_type = other DNA

SEQ ID NO: 75889 - DNA, 80 bp, synthetic construct; identical to SEQ ID NO: 42114
  source 1..80: mol_type = other DNA

SEQ ID NO: 75890 - DNA, 80 bp, synthetic construct; identical to SEQ ID NO: 14403
  source 1..80: mol_type = other DNA

SEQ ID NO: 75891 - DNA, 80 bp, synthetic construct; identical to SEQ ID NO: 42116
  source 1..80: mol_type = other DNA

SEQ ID NO: 75892 - DNA, 80 bp, synthetic construct; identical to SEQ ID NO: 42117
  source 1..80: mol_type = other DNA

SEQ ID NO: 75893 - DNA, 80 bp, synthetic construct; identical to SEQ ID NO: 42118
  source 1..80: mol_type = other DNA

SEQ ID NO: 75894 - DNA, 80 bp, synthetic construct; identical to SEQ ID NO: 14404
  source 1..80: mol_type = other DNA

SEQ ID NO: 75895 - DNA, 80 bp, synthetic construct; identical to SEQ ID NO: 42121
  source 1..80: mol_type = other DNA

SEQ ID NO: 75896 - DNA, 80 bp, synthetic construct; identical to SEQ ID NO: 42122
  source 1..80: mol_type = other DNA

SEQ ID NO: 75897 - DNA, 80 bp, synthetic construct; identical to SEQ ID NO: 14405
  source 1..80: mol_type = other DNA

SEQ ID NO: 75898 - DNA, 80 bp, synthetic construct; identical to SEQ ID NO: 42124
  source 1..80: mol_type = other DNA

SEQ ID NO: 75899 - DNA, 80 bp, synthetic construct; identical to SEQ ID NO: 42125
  source 1..80: mol_type = other DNA

SEQ ID NO: 75900 - DNA, 80 bp, synthetic construct; identical to SEQ ID NO: 42126
  source 1..80: mol_type = other DNA

SEQ ID NO: 75901 - DNA, 80 bp, synthetic construct; identical to SEQ ID NO: 14406
  source 1..80: mol_type = other DNA

SEQ ID NO: 75902 - DNA, 80 bp, synthetic construct; identical to SEQ ID NO: 42128
  source 1..80: mol_type = other DNA

SEQ ID NO: 75903 - DNA, 80 bp, synthetic construct; identical to SEQ ID NO: 42129
  source 1..80: mol_type = other DNA

SEQ ID NO: 75904 - DNA, 80 bp, synthetic construct; identical to SEQ ID NO: 42130
  source 1..80: mol_type = other DNA

SEQ ID NO: 75905 - DNA, 80 bp, synthetic construct; identical to SEQ ID NO: 14407
  source 1..80: mol_type = other DNA

SEQ ID NO: 75906 - DNA, 80 bp, synthetic construct; identical to SEQ ID NO: 42132
  source 1..80: mol_type = other DNA

SEQ ID NO: 75907 - DNA, 80 bp, synthetic construct; identical to SEQ ID NO: 42133
  source 1..80: mol_type = other DNA

SEQ ID NO: 75908 - DNA, 80 bp, synthetic construct; identical to SEQ ID NO: 42134
  source 1..80: mol_type = other DNA

SEQ ID NO: 75909 - DNA, 80 bp, synthetic construct; identical to SEQ ID NO: 42135
  source 1..80: mol_type = other DNA

SEQ ID NO: 75910 - DNA, 80 bp, synthetic construct; identical to SEQ ID NO: 14408
  source 1..80: mol_type = other DNA

SEQ ID NO: 75911 - DNA, 80 bp, synthetic construct; identical to SEQ ID NO: 42137
  source 1..80: mol_type = other DNA

SEQ ID NO: 75912 - DNA, 80 bp, synthetic construct; identical to SEQ ID NO: 42138
  source 1..80: mol_type = other DNA

SEQ ID NO: 75913 - DNA, 80 bp, synthetic construct; identical to SEQ ID NO: 14409
  source 1..80: mol_type = other DNA

SEQ ID NO: 75914 - DNA, 80 bp, synthetic construct; identical to SEQ ID NO: 42140
  source 1..80: mol_type = other DNA

SEQ ID NO: 75915 - DNA, 80 bp, synthetic construct; identical to SEQ ID NO: 14410
  source 1..80: mol_type = other DNA

SEQ ID NO: 75916 - DNA, 80 bp, synthetic construct; identical to SEQ ID NO: 42142
  source 1..80: mol_type = other DNA

SEQ ID NO: 75917 - DNA, 80 bp, synthetic construct; identical to SEQ ID NO: 42143
  source 1..80: mol_type = other DNA

SEQ ID NO: 75918 - DNA, 80 bp, synthetic construct; identical to SEQ ID NO: 42144
  source 1..80: mol_type = other DNA

SEQ ID NO: 75919 - DNA, 80 bp, synthetic construct; identical to SEQ ID NO: 14411
  source 1..80: mol_type = other DNA

SEQ ID NO: 75920 - DNA, 80 bp, synthetic construct; identical to SEQ ID NO: 42146
  source 1..80: mol_type = other DNA

SEQ ID NO: 75921 - DNA, 80 bp, synthetic construct; identical to SEQ ID NO: 42148
  source 1..80: mol_type = other DNA

SEQ ID NO: 75922 - DNA, 80 bp, synthetic construct; identical to SEQ ID NO: 42149
  source 1..80: mol_type = other DNA

SEQ ID NO: 75923 - DNA, 80 bp, synthetic construct; identical to SEQ ID NO: 14412
  source 1..80: mol_type = other DNA

SEQ ID NO: 75924 - DNA, 80 bp, synthetic construct; identical to SEQ ID NO: 42151
  source 1..80: mol_type = other DNA

SEQ ID NO: 75925 - DNA, 80 bp, synthetic construct; identical to SEQ ID NO: 42152
  source 1..80: mol_type = other DNA

SEQ ID NO: 75926 - DNA, 80 bp, synthetic construct; identical to SEQ ID NO: 42153
  source 1..80: mol_type = other DNA

SEQ ID NO: 75927 - DNA, 80 bp, synthetic construct; identical to SEQ ID NO: 14413
  source 1..80: mol_type = other DNA

SEQ ID NO: 75928 - DNA, 80 bp, synthetic construct; identical to SEQ ID NO: 42155
  source 1..80: mol_type = other DNA

SEQ ID NO: 75929 - DNA, 80 bp, synthetic construct; identical to SEQ ID NO: 14414
  source 1..80: mol_type = other DNA

SEQ ID NO: 75930 - DNA, 80 bp, synthetic construct; identical to SEQ ID NO: 42158
  source 1..80: mol_type = other DNA

SEQ ID NO: 75931 - DNA, 80 bp, synthetic construct; identical to SEQ ID NO: 42159
  source 1..80: mol_type = other DNA

SEQ ID NO: 75932 - DNA, 80 bp, synthetic construct; identical to SEQ ID NO: 42160
  source 1..80: mol_type = other DNA

SEQ ID NO: 75933 - DNA, 80 bp, synthetic construct; identical to SEQ ID NO: 42161
  source 1..80: mol_type = other DNA

SEQ ID NO: 75934 - DNA, 80 bp, synthetic construct; identical to SEQ ID NO: 14415
  source 1..80: mol_type = other DNA

SEQ ID NO: 75935 - DNA, 80 bp, synthetic construct; identical to SEQ ID NO: 42163
  source 1..80: mol_type = other DNA

SEQ ID NO: 75936 - DNA, 80 bp, synthetic construct; identical to SEQ ID NO: 42164
  source 1..80: mol_type = other DNA

SEQ ID NO: 75937 - DNA, 80 bp, synthetic construct; identical to SEQ ID NO: 42165
  source 1..80: mol_type = other DNA

SEQ ID NO: 75938 - DNA, 80 bp, synthetic construct; identical to SEQ ID NO: 42167
  source 1..80: mol_type = other DNA

SEQ ID NO: 75939 - DNA, 80 bp, synthetic construct; identical to SEQ ID NO: 42168
  source 1..80: mol_type = other DNA

SEQ ID NO: 75940 - DNA, 80 bp, synthetic construct; identical to SEQ ID NO: 42169
  source 1..80: mol_type = other DNA

SEQ ID NO: 75941 - DNA, 80 bp, synthetic construct; identical to SEQ ID NO: 14417
  source 1..80: mol_type = other DNA

SEQ ID NO: 75942 - DNA, 80 bp, synthetic construct; identical to SEQ ID NO: 42171
  source 1..80: mol_type = other DNA

SEQ ID NO: 75943 - DNA, 80 bp, synthetic construct; identical to SEQ ID NO: 42172
  source 1..80: mol_type = other DNA

SEQ ID NO: 75944 - DNA, 80 bp, synthetic construct; identical to SEQ ID NO: 42173
  source 1..80: mol_type = other DNA

SEQ ID NO: 75945 - DNA, 80 bp, synthetic construct; identical to SEQ ID NO: 14418
  source 1..80: mol_type = other DNA

SEQ ID NO: 75946 - DNA, 80 bp, synthetic construct; identical to SEQ ID NO: 42175
  source 1..80: mol_type = other DNA

SEQ ID NO: 75947 - DNA, 80 bp, synthetic construct; identical to SEQ ID NO: 42176
  source 1..80: mol_type = other DNA

SEQ ID NO: 75948 - DNA, 80 bp, synthetic construct; identical to SEQ ID NO: 42177
  source 1..80: mol_type = other DNA

SEQ ID NO: 75949 - DNA, 80 bp, synthetic construct; identical to SEQ ID NO: 14419
  source 1..80: mol_type = other DNA

SEQ ID NO: 75950 - DNA, 80 bp, synthetic construct; identical to SEQ ID NO: 42180
  source 1..80: mol_type = other DNA

SEQ ID NO: 75951 - DNA, 80 bp, synthetic construct; identical to SEQ ID NO: 42181
  source 1..80: mol_type = other DNA

SEQ ID NO: 75952 - DNA, 80 bp, synthetic construct; identical to SEQ ID NO: 14420
  source 1..80: mol_type = other DNA

SEQ ID NO: 75953 - DNA, 80 bp, synthetic construct; identical to SEQ ID NO: 42183
  source 1..80: mol_type = other DNA

SEQ ID NO: 75954 - DNA, 80 bp, synthetic construct; identical to SEQ ID NO: 42184
  source 1..80: mol_type = other DNA

SEQ ID NO: 75955 - DNA, 80 bp, synthetic construct; identical to SEQ ID NO: 42185
  source 1..80: mol_type = other DNA

SEQ ID NO: 75956 - DNA, 80 bp, synthetic construct; identical to SEQ ID NO: 14421
  source 1..80: mol_type = other DNA

SEQ ID NO: 75957 - DNA, 80 bp, synthetic construct; identical to SEQ ID NO: 42187
  source 1..80: mol_type = other DNA

SEQ ID NO: 75958 - DNA, 80 bp, synthetic construct; identical to SEQ ID NO: 42188
  source 1..80: mol_type = other DNA

SEQ ID NO: 75959 - DNA, 80 bp, synthetic construct; identical to SEQ ID NO: 42189
  source 1..80: mol_type = other DNA

SEQ ID NO: 75960 - DNA, 80 bp, synthetic construct; identical to SEQ ID NO: 42190
  source 1..80: mol_type = other DNA

SEQ ID NO: 75961 - DNA, 80 bp, synthetic construct; identical to SEQ ID NO: 14422
  source 1..80: mol_type = other DNA

SEQ ID NO: 75962 - DNA, 80 bp, synthetic construct; identical to SEQ ID NO: 42192
  source 1..80: mol_type = other DNA

SEQ ID NO: 75963 - DNA, 80 bp, synthetic construct; identical to SEQ ID NO: 42193
  source 1..80: mol_type = other DNA

SEQ ID NO: 75964 - DNA, 80 bp, synthetic construct; identical to SEQ ID NO: 42194
  source 1..80: mol_type = other DNA

SEQ ID NO: 75965 - DNA, 80 bp, synthetic construct; identical to SEQ ID NO: 14423
  source 1..80: mol_type = other DNA

SEQ ID NO: 75966 - DNA, 80 bp, synthetic construct; identical to SEQ ID NO: 42196
  source 1..80: mol_type = other DNA

SEQ ID NO: 75967 - DNA, 80 bp, synthetic construct; identical to SEQ ID NO: 42197
  source 1..80: mol_type = other DNA

SEQ ID NO: 75968 - DNA, 80 bp, synthetic construct; identical to SEQ ID NO: 14424
  source 1..80: mol_type = other DNA

SEQ ID NO: 75969 - DNA, 80 bp, synthetic construct; identical to SEQ ID NO: 42199
  source 1..80: mol_type = other DNA

SEQ ID NO: 75970 - DNA, 80 bp, synthetic construct; identical to SEQ ID NO: 42200
  source 1..80: mol_type = other DNA

SEQ ID NO: 75971 - DNA, 80 bp, synthetic construct; identical to SEQ ID NO: 42201
  source 1..80: mol_type = other DNA

SEQ ID NO: 75972 - DNA, 80 bp, synthetic construct; identical to SEQ ID NO: 14425
  source 1..80: mol_type = other DNA

SEQ ID NO: 75973 - DNA, 80 bp, synthetic construct; identical to SEQ ID NO: 42203
  source 1..80: mol_type = other DNA

SEQ ID NO: 75974 - DNA, 80 bp, synthetic construct; identical to SEQ ID NO: 42204
  source 1..80: mol_type = other DNA

SEQ ID NO: 75975 - DNA, 80 bp, synthetic construct; identical to SEQ ID NO: 42205
  source 1..80: mol_type = other DNA

SEQ ID NO: 75976 - DNA, 80 bp, synthetic construct; identical to SEQ ID NO: 42206
  source 1..80: mol_type = other DNA

SEQ ID NO: 75977 - DNA, 80 bp, synthetic construct; identical to SEQ ID NO: 14426
  source 1..80: mol_type = other DNA

SEQ ID NO: 75978 - DNA, 80 bp, synthetic construct; identical to SEQ ID NO: 42208
  source 1..80: mol_type = other DNA

SEQ ID NO: 75979 - DNA, 80 bp, synthetic construct; identical to SEQ ID NO: 42209
  source 1..80: mol_type = other DNA

SEQ ID NO: 75980 - DNA, 80 bp, synthetic construct; identical to SEQ ID NO: 14427
  source 1..80: mol_type = other DNA

SEQ ID NO: 75981 - DNA, 80 bp, synthetic construct; identical to SEQ ID NO: 42211
  source 1..80: mol_type = other DNA

SEQ ID NO: 75982 - DNA, 80 bp, synthetic construct; identical to SEQ ID NO: 42212
  source 1..80: mol_type = other DNA

SEQ ID NO: 75983 - DNA, 80 bp, synthetic construct; identical to SEQ ID NO: 42213
  source 1..80: mol_type = other DNA

SEQ ID NO: 75984 - DNA, 80 bp, synthetic construct; identical to SEQ ID NO: 14428
  source 1..80: mol_type = other DNA

SEQ ID NO: 75985 - DNA, 80 bp, synthetic construct; identical to SEQ ID NO: 42215
  source 1..80: mol_type = other DNA

SEQ ID NO: 75986 - DNA, 80 bp, synthetic construct; identical to SEQ ID NO: 42216
  source 1..80: mol_type = other DNA

SEQ ID NO: 75987 - DNA, 80 bp, synthetic construct; identical to SEQ ID NO: 42217
  source 1..80: mol_type = other DNA

SEQ ID NO: 75988 - DNA, 80 bp, synthetic construct; identical to SEQ ID NO: 14429
  source 1..80: mol_type = other DNA

SEQ ID NO: 75989 - DNA, 80 bp, synthetic construct; identical to SEQ ID NO: 42219
  source 1..80: mol_type = other DNA

SEQ ID NO: 75990 - DNA, 80 bp, synthetic construct; identical to SEQ ID NO: 42220
  source 1..80: mol_type = other DNA

SEQ ID NO: 75991 - DNA, 80 bp, synthetic construct; identical to SEQ ID NO: 42221
  source 1..80: mol_type = other DNA

SEQ ID NO: 75992 - DNA, 80 bp, synthetic construct; identical to SEQ ID NO: 14430
  source 1..80: mol_type = other DNA

SEQ ID NO: 75993 - DNA, 80 bp, synthetic construct; identical to SEQ ID NO: 42223
  source 1..80: mol_type = other DNA

SEQ ID NO: 75994 - DNA, 80 bp, synthetic construct; identical to SEQ ID NO: 42224
  source 1..80: mol_type = other DNA

SEQ ID NO: 75995 - DNA, 80 bp, synthetic construct; identical to SEQ ID NO: 14431
  source 1..80: mol_type = other DNA

SEQ ID NO: 75996 - DNA, 80 bp, synthetic construct; identical to SEQ ID NO: 42226
  source 1..80: mol_type = other DNA

SEQ ID NO: 75997 - DNA, 80 bp, synthetic construct; identical to SEQ ID NO: 42227
  source 1..80: mol_type = other DNA

SEQ ID NO: 75998 - DNA, 80 bp, synthetic construct; identical to SEQ ID NO: 14432
  source 1..80: mol_type = other DNA

SEQ ID NO: 75999 - DNA, 80 bp, synthetic construct; identical to SEQ ID NO: 42229
  source 1..80: mol_type = other DNA

SEQ ID NO: 76000 - DNA, 80 bp, synthetic construct; identical to SEQ ID NO: 42230
  source 1..80: mol_type = other DNA

SEQ ID NO: 76001 - DNA, 80 bp, synthetic construct; identical to SEQ ID NO: 42231
  source 1..80: mol_type = other DNA

SEQ ID NO: 76002 - DNA, 80 bp, synthetic construct; identical to SEQ ID NO: 14433
  source 1..80: mol_type = other DNA

SEQ ID NO: 76003 - DNA, 80 bp, synthetic construct; identical to SEQ ID NO: 42233
  source 1..80: mol_type = other DNA

SEQ ID NO: 76004 - DNA, 80 bp, synthetic construct; identical to SEQ ID NO: 42234
  source 1..80: mol_type = other DNA

SEQ ID NO: 76005 - DNA, 80 bp, synthetic construct; identical to SEQ ID NO: 42235
  source 1..80: mol_type = other DNA

SEQ ID NO: 76006 - DNA, 80 bp, synthetic construct; identical to SEQ ID NO: 42236
  source 1..80: mol_type = other DNA

SEQ ID NO: 76007 - DNA, 80 bp, synthetic construct; identical to SEQ ID NO: 14434
  source 1..80: mol_type = other DNA

SEQ ID NO: 76008 - DNA, 80 bp, synthetic construct; identical to SEQ ID NO: 42238
  source 1..80: mol_type = other DNA

SEQ ID NO: 76009 - DNA, 80 bp, synthetic construct; identical to SEQ ID NO: 42239
  source 1..80: mol_type = other DNA

SEQ ID NO: 76010 - DNA, 80 bp, synthetic construct; identical to SEQ ID NO: 42240
  source 1..80: mol_type = other DNA

SEQ ID NO: 76011 - DNA, 80 bp, synthetic construct; identical to SEQ ID NO: 14435
  source 1..80: mol_type = other DNA

SEQ ID NO: 76012 - DNA, 80 bp, synthetic construct; identical to SEQ ID NO: 42242
  source 1..80: mol_type = other DNA

SEQ ID NO: 76013 - DNA, 80 bp, synthetic construct; identical to SEQ ID NO: 42243
  source 1..80: mol_type = other DNA

SEQ ID NO: 76014 - DNA, 80 bp, synthetic construct; identical to SEQ ID NO: 42244
  source 1..80: mol_type = other DNA

SEQ ID NO: 76015 - DNA, 80 bp, synthetic construct; identical to SEQ ID NO: 14436
  source 1..80: mol_type = other DNA

SEQ ID NO: 76016 - DNA, 80 bp, synthetic construct; identical to SEQ ID NO: 42246
  source 1..80: mol_type = other DNA

SEQ ID NO: 76017 - DNA, 80 bp, synthetic construct; identical to SEQ ID NO: 42247
  source 1..80: mol_type = other DNA

SEQ ID NO: 76018 - DNA, 80 bp, synthetic construct; identical to SEQ ID NO: 14437
  source 1..80: mol_type = other DNA

SEQ ID NO: 76019 - DNA, 80 bp, synthetic construct; identical to SEQ ID NO: 42249
  source 1..80: mol_type = other DNA

SEQ ID NO: 76020 - DNA, 80 bp, synthetic construct; identical to SEQ ID NO: 42250
  source 1..80: mol_type = other DNA

SEQ ID NO: 76021 - DNA, 80 bp, synthetic construct; identical to SEQ ID NO: 42251
  source 1..80: mol_type = other DNA

SEQ ID NO: 76022 - DNA, 80 bp, synthetic construct; identical to SEQ ID NO: 14438
  source 1..80: mol_type = other DNA

SEQ ID NO: 76023 - DNA, 80 bp, synthetic construct; identical to SEQ ID NO: 42253
  source 1..80: mol_type = other DNA

SEQ ID NO: 76024 - DNA, 80 bp, synthetic construct; identical to SEQ ID NO: 42254
  source 1..80: mol_type = other DNA

SEQ ID NO: 76025 - DNA, 80 bp, synthetic construct; identical to SEQ ID NO: 42255
  source 1..80: mol_type = other DNA

SEQ ID NO: 76026 - DNA, 80 bp, synthetic construct; identical to SEQ ID NO: 14439
  source 1..80: mol_type = other DNA

SEQ ID NO: 76027 - DNA, 80 bp, synthetic construct; identical to SEQ ID NO: 42257
  source 1..80: mol_type = other DNA

SEQ ID NO: 76028 - DNA, 80 bp, synthetic construct; identical to SEQ ID NO: 42258
  source 1..80: mol_type = other DNA

SEQ ID NO: 76029 - DNA, 80 bp, synthetic construct; identical to SEQ ID NO: 42259
  source 1..80: mol_type = other DNA

SEQ ID NO: 76030 - DNA, 80 bp, synthetic construct; identical to SEQ ID NO: 14440
  source 1..80: mol_type = other DNA

SEQ ID NO: 76031 - DNA, 80 bp, synthetic construct; identical to SEQ ID NO: 42261
  source 1..80: mol_type = other DNA

SEQ ID NO: 76032 - DNA, 80 bp, synthetic construct; identical to SEQ ID NO: 42262
  source 1..80: mol_type = other DNA

SEQ ID NO: 76033 - DNA, 80 bp, synthetic construct; identical to SEQ ID NO: 42263
  source 1..80: mol_type = other DNA

SEQ ID NO: 76034 - DNA, 80 bp, synthetic construct; identical to SEQ ID NO: 42264
  source 1..80: mol_type = other DNA

SEQ ID NO: 76035 - DNA, 80 bp, synthetic construct; identical to SEQ ID NO: 14441
  source 1..80: mol_type = other DNA

SEQ ID NO: 76036 - DNA, 80 bp, synthetic construct; identical to SEQ ID NO: 42266
  source 1..80: mol_type = other DNA

SEQ ID NO: 76037 - DNA, 80 bp, synthetic construct; identical to SEQ ID NO: 14442
  source 1..80: mol_type = other DNA

SEQ ID NO: 76038 - DNA, 80 bp, synthetic construct; identical to SEQ ID NO: 42269
  source 1..80: mol_type = other DNA

SEQ ID NO: 76039 - DNA, 80 bp, synthetic construct; identical to SEQ ID NO: 42270
  source 1..80: mol_type = other DNA

SEQ ID NO: 76040 - DNA, 80 bp, synthetic construct; identical to SEQ ID NO: 42271
  source 1..80: mol_type = other DNA

SEQ ID NO: 76041 - DNA, 80 bp, synthetic construct; identical to SEQ ID NO: 14443
  source 1..80: mol_type = other DNA

SEQ ID NO: 76042 - DNA, 80 bp, synthetic construct; identical to SEQ ID NO: 42273
  source 1..80: mol_type = other DNA

SEQ ID NO: 76043 - DNA, 80 bp, synthetic construct; identical to SEQ ID NO: 42274
  source 1..80: mol_type = other DNA

SEQ ID NO: 76044 - DNA, 80 bp, synthetic construct; identical to SEQ ID NO: 42275
  source 1..80: mol_type = other DNA

SEQ ID NO: 76045 - DNA, 80 bp, synthetic construct; identical to SEQ ID NO: 14444
  source 1..80: mol_type = other DNA

SEQ ID NO: 76046 - DNA, 80 bp, synthetic construct; identical to SEQ ID NO: 42277
  source 1..80: mol_type = other DNA

SEQ ID NO: 76047 - DNA, 80 bp, synthetic construct; identical to SEQ ID NO: 42278
  source 1..80: mol_type = other DNA

SEQ ID NO: 76048 - DNA, 80 bp, synthetic construct; identical to SEQ ID NO: 42279
  source 1..80: mol_type = other DNA

SEQ ID NO: 76049 - DNA, 80 bp, synthetic construct; identical to SEQ ID NO: 14445
  source 1..80: mol_type = other DNA

SEQ ID NO: 76050 - DNA, 80 bp, synthetic construct; identical to SEQ ID NO: 42281
  source 1..80: mol_type = other DNA

SEQ ID NO: 76051 - DNA, 80 bp, synthetic construct; identical to SEQ ID NO: 42282
  source 1..80: mol_type = other DNA

SEQ ID NO: 76052 - DNA, 80 bp, synthetic construct; identical to SEQ ID NO: 42283
  source 1..80: mol_type = other DNA

SEQ ID NO: 76053 - DNA, 80 bp, synthetic construct; identical to SEQ ID NO: 42284
  source 1..80: mol_type = other DNA

SEQ ID NO: 76054 - DNA, 80 bp, synthetic construct; identical to SEQ ID NO: 42285
  source 1..80: mol_type = other DNA

SEQ ID NO: 76055 - DNA, 80 bp, synthetic construct; identical to SEQ ID NO: 42286
  source 1..80: mol_type = other DNA

SEQ ID NO: 76056 - DNA, 80 bp, synthetic construct; identical to SEQ ID NO: 14446
  source 1..80: mol_type = other DNA

SEQ ID NO: 76057 - DNA, 80 bp, synthetic construct; identical to SEQ ID NO: 42288
  source 1..80: mol_type = other DNA

SEQ ID NO: 76058 - DNA, 80 bp, synthetic construct; identical to SEQ ID NO: 42289
  source 1..80: mol_type = other DNA

SEQ ID NO: 76059 - DNA, 80 bp, synthetic construct; identical to SEQ ID NO: 42290
  source 1..80: mol_type = other DNA

SEQ ID NO: 76060 - DNA, 80 bp, synthetic construct; identical to SEQ ID NO: 14447
  source 1..80: mol_type = other DNA

SEQ ID NO: 76061 - DNA, 80 bp, synthetic construct; identical to SEQ ID NO: 42293
  source 1..80: mol_type = other DNA

SEQ ID NO: 76062 - DNA, 80 bp, synthetic construct; identical to SEQ ID NO: 42294
  source 1..80: mol_type = other DNA

SEQ ID NO: 76063 - DNA, 80 bp, synthetic construct; identical to SEQ ID NO: 14448
  source 1..80: mol_type = other DNA

SEQ ID NO: 76064 - DNA, 80 bp, synthetic construct; identical to SEQ ID NO: 42296
  source 1..80: mol_type = other DNA

SEQ ID NO: 76065 - DNA, 80 bp, synthetic construct; identical to SEQ ID NO: 42297
  source 1..80: mol_type = other DNA

SEQ ID NO: 76066 - DNA, 80 bp, synthetic construct; identical to SEQ ID NO: 14449
  source 1..80: mol_type = other DNA

SEQ ID NO: 76067 - DNA, 80 bp, synthetic construct; identical to SEQ ID NO: 42299
  source 1..80: mol_type = other DNA

SEQ ID NO: 76068 - DNA, 80 bp, synthetic construct; identical to SEQ ID NO: 42300
  source 1..80: mol_type = other DNA

SEQ ID NO: 76069 - DNA, 80 bp, synthetic construct; identical to SEQ ID NO: 42301
  source 1..80: mol_type = other DNA

SEQ ID NO: 76070 - DNA, 80 bp, synthetic construct; identical to SEQ ID NO: 14450
  source 1..80: mol_type = other DNA

SEQ ID NO: 76071 - DNA, 80 bp, synthetic construct; identical to SEQ ID NO: 42303
  source 1..80: mol_type = other DNA

SEQ ID NO: 76072 - DNA, 80 bp, synthetic construct; identical to SEQ ID NO: 42304
  source 1..80: mol_type = other DNA

SEQ ID NO: 76073 - DNA, 80 bp, synthetic construct; identical to SEQ ID NO: 42305
  source 1..80: mol_type = other DNA

SEQ ID NO: 76074 - DNA, 80 bp, synthetic construct; identical to SEQ ID NO: 14451
  source 1..80: mol_type = other DNA

SEQ ID NO: 76075 - DNA, 80 bp, synthetic construct; identical to SEQ ID NO: 42307
  source 1..80: mol_type = other DNA

SEQ ID NO: 76076 - DNA, 80 bp, synthetic construct; identical to SEQ ID NO: 42308
  source 1..80: mol_type = other DNA

SEQ ID NO: 76077 - DNA, 80 bp, synthetic construct; identical to SEQ ID NO: 42309
  source 1..80: mol_type = other DNA

SEQ ID NO: 76078 - DNA, 80 bp, synthetic construct; identical to SEQ ID NO: 42310
  source 1..80: mol_type = other DNA

SEQ ID NO: 76079 - DNA, 80 bp, synthetic construct; identical to SEQ ID NO: 14452
  source 1..80: mol_type = other DNA

SEQ ID NO: 76080 - DNA, 80 bp, synthetic construct; identical to SEQ ID NO: 42312
  source 1..80: mol_type = other DNA

SEQ ID NO: 76081 - DNA, 80 bp, synthetic construct; identical to SEQ ID NO: 42313
  source 1..80: mol_type = other DNA

SEQ ID NO: 76082 - DNA, 80 bp, synthetic construct; identical to SEQ ID NO: 42314
  source 1..80: mol_type = other DNA

SEQ ID NO: 76083 - DNA, 80 bp, synthetic construct; identical to SEQ ID NO: 14453
  source 1..80: mol_type = other DNA

SEQ ID NO: 76084 - DNA, 80 bp, synthetic construct; identical to SEQ ID NO: 42316
  source 1..80: mol_type = other DNA

SEQ ID NO: 76085 - DNA, 80 bp, synthetic construct; identical to SEQ ID NO: 42317
  source 1..80: mol_type = other DNA

SEQ ID NO: 76086 - DNA, 80 bp, synthetic construct; identical to SEQ ID NO: 42318
  source 1..80: mol_type = other DNA

SEQ ID NO: 76087 - DNA, 80 bp, synthetic construct; identical to SEQ ID NO: 14454
  source 1..80: mol_type = other DNA

SEQ ID NO: 76088 - DNA, 80 bp, synthetic construct; identical to SEQ ID NO: 42320
  source 1..80: mol_type = other DNA

SEQ ID NO: 76089 - DNA, 80 bp, synthetic construct; identical to SEQ ID NO: 42321
  source 1..80: mol_type = other DNA

SEQ ID NO: 76090 - DNA, 80 bp, synthetic construct; identical to SEQ ID NO: 14455
  source 1..80: mol_type = other DNA

SEQ ID NO: 76091 - DNA, 80 bp, synthetic construct; identical to SEQ ID NO: 42324
  source 1..80: mol_type = other DNA

SEQ ID NO: 76092 - DNA, 80 bp, synthetic construct; identical to SEQ ID NO: 42325
  source 1..80: mol_type = other DNA

SEQ ID NO: 76093 - DNA, 80 bp, synthetic construct; identical to SEQ ID NO: 42326
  source 1..80: mol_type = other DNA

SEQ ID NO: 76094 - DNA, 80 bp, synthetic construct; identical to SEQ ID NO: 14456
  source 1..80: mol_type = other DNA

SEQ ID NO: 76095 - DNA, 80 bp, synthetic construct; identical to SEQ ID NO: 42328
  source 1..80: mol_type = other DNA

SEQ ID NO: 76096 - DNA, 80 bp, synthetic construct; identical to SEQ ID NO: 42329
  source 1..80: mol_type = other DNA

SEQ ID NO: 76097 - DNA, 80 bp, synthetic construct; identical to SEQ ID NO: 42330
  source 1..80: mol_type = other DNA

SEQ ID NO: 76098 - DNA, 80 bp, synthetic construct; identical to SEQ ID NO: 14457
  source 1..80: mol_type = other DNA

SEQ ID NO: 76099 - DNA, 80 bp, synthetic construct; identical to SEQ ID NO: 42332
  source 1..80: mol_type = other DNA

SEQ ID NO: 76100 - DNA, 80 bp, synthetic construct; identical to SEQ ID NO: 42333
  source 1..80: mol_type = other DNA

SEQ ID NO: 76101 - DNA, 80 bp, synthetic construct; identical to SEQ ID NO: 14458
  source 1..80: mol_type = other DNA

SEQ ID NO: 76102 - DNA, 80 bp, synthetic construct; identical to SEQ ID NO: 42335
  source 1..80: mol_type = other DNA

SEQ ID NO: 76103 - DNA, 80 bp, synthetic construct; identical to SEQ ID NO: 42336
  source 1..80: mol_type = other DNA

SEQ ID NO: 76104 - DNA, 80 bp, synthetic construct; identical to SEQ ID NO: 14459
  source 1..80: mol_type = other DNA

SEQ ID NO: 76105 - DNA, 80 bp, synthetic construct; identical to SEQ ID NO: 42338
  source 1..80: mol_type = other DNA

SEQ ID NO: 76106 - DNA, 80 bp, synthetic construct; identical to SEQ ID NO: 42339
  source 1..80: mol_type = other DNA

SEQ ID NO: 76107 - DNA, 80 bp, synthetic construct; identical to SEQ ID NO: 42340
  source 1..80: mol_type = other DNA

SEQ ID NO: 76108 - DNA, 80 bp, synthetic construct; identical to SEQ ID NO: 42341
  source 1..80: mol_type = other DNA

SEQ ID NO: 76109 - DNA, 80 bp, synthetic construct; identical to SEQ ID NO: 42342
  source 1..80: mol_type = other DNA

SEQ ID NO: 76110 - DNA, 80 bp, synthetic construct; identical to SEQ ID NO: 14460
  source 1..80: mol_type = other DNA

SEQ ID NO: 76111 - DNA, 80 bp, synthetic construct; identical to SEQ ID NO: 42344
  source 1..80: mol_type = other DNA

SEQ ID NO: 76112 - DNA, 80 bp, synthetic construct; identical to SEQ ID NO: 42345
  source 1..80: mol_type = other DNA

SEQ ID NO: 76113 - DNA, 80 bp, synthetic construct; identical to SEQ ID NO: 14461
  source 1..80: mol_type = other DNA

SEQ ID NO: 76114 - DNA, 80 bp, synthetic construct; identical to SEQ ID NO: 42348
  source 1..80: mol_type = other DNA

SEQ ID NO: 76115 - DNA, 80 bp, synthetic construct; identical to SEQ ID NO: 42349
  source 1..80: mol_type = other DNA

SEQ ID NO: 76116 - DNA, 80 bp, synthetic construct; identical to SEQ ID NO: 14462
  source 1..80: mol_type = other DNA

SEQ ID NO: 76117 - DNA, 80 bp, synthetic construct; identical to SEQ ID NO: 42351
  source 1..80: mol_type = other DNA

SEQ ID NO: 76118 - DNA, 80 bp, synthetic construct; identical to SEQ ID NO: 42352
  source 1..80: mol_type = other DNA

SEQ ID NO: 76119 - DNA, 80 bp, synthetic construct; identical to SEQ ID NO: 42353
  source 1..80: mol_type = other DNA

SEQ ID NO: 76120 - DNA, 80 bp, synthetic construct; identical to SEQ ID NO: 42354
  source 1..80: mol_type = other DNA

SEQ ID NO: 76121 - DNA, 80 bp, synthetic construct; identical to SEQ ID NO: 14463
  source 1..80: mol_type = other DNA

SEQ ID NO: 76122 - DNA, 80 bp, synthetic construct; identical to SEQ ID NO: 42356
  source 1..80: mol_type = other DNA

SEQ ID NO: 76123 - DNA, 80 bp, synthetic construct; identical to SEQ ID NO: 42357
  source 1..80: mol_type = other DNA

SEQ ID NO: 76124 - DNA, 80 bp, synthetic construct; identical to SEQ ID NO: 42358
  source 1..80: mol_type = other DNA

SEQ ID NO: 76125 - DNA, 80 bp, synthetic construct; identical to SEQ ID NO: 14464
  source 1..80: mol_type = other DNA

SEQ ID NO: 76126 - DNA, 80 bp, synthetic construct; identical to SEQ ID NO: 42360
  source 1..80: mol_type = other DNA

SEQ ID NO: 76127 - DNA, 80 bp, synthetic construct; identical to SEQ ID NO: 42361
  source 1..80: mol_type = other DNA

SEQ ID NO: 76128 - DNA, 80 bp, synthetic construct; identical to SEQ ID NO: 14465
  source 1..80: mol_type = other DNA

SEQ ID NO: 76129 - DNA, 80 bp, synthetic construct; identical to SEQ ID NO: 42363
  source 1..80: mol_type = other DNA

SEQ ID NO: 76130 - DNA, 80 bp, synthetic construct; identical to SEQ ID NO: 42365
  source 1..80: mol_type = other DNA

SEQ ID NO: 76131 - DNA, 80 bp, synthetic construct; identical to SEQ ID NO: 14466
  source 1..80: mol_type = other DNA

SEQ ID NO: 76132 - DNA, 80 bp, synthetic construct; identical to SEQ ID NO: 42367
  source 1..80: mol_type = other DNA

SEQ ID NO: 76133 - DNA, 80 bp, synthetic construct; identical to SEQ ID NO: 42368
  source 1..80: mol_type = other DNA

SEQ ID NO: 76134 - DNA, 80 bp, synthetic construct; identical to SEQ ID NO: 42369
  source 1..80: mol_type = other DNA

SEQ ID NO: 76135 - DNA, 80 bp, synthetic construct; identical to SEQ ID NO: 14467
  source 1..80: mol_type = other DNA

SEQ ID NO: 76136 - DNA, 80 bp, synthetic construct; identical to SEQ ID NO: 42372
  source 1..80: mol_type = other DNA

SEQ ID NO: 76137 - DNA, 80 bp, synthetic construct; identical to SEQ ID NO: 42373
  source 1..80: mol_type = other DNA

SEQ ID NO: 76138 - DNA, 80 bp, synthetic construct; identical to SEQ ID NO: 42374
  source 1..80: mol_type = other DNA

SEQ ID NO: 76139 - DNA, 80 bp, synthetic construct; identical to SEQ ID NO: 14468
  source 1..80: mol_type = other DNA

SEQ ID NO: 76140 - DNA, 80 bp, synthetic construct; identical to SEQ ID NO: 42376
  source 1..80: mol_type = other DNA

SEQ ID NO: 76141 - DNA, 80 bp, synthetic construct; identical to SEQ ID NO: 42377
  source 1..80: mol_type = other DNA

SEQ ID NO: 76142 - DNA, 80 bp, synthetic construct; identical to SEQ ID NO: 14469
  source 1..80: mol_type = other DNA

SEQ ID NO: 76143 - DNA, 80 bp, synthetic construct; identical to SEQ ID NO: 42380
  source 1..80: mol_type = other DNA

SEQ ID NO: 76144 - DNA, 80 bp, synthetic construct; identical to SEQ ID NO: 42381
  source 1..80: mol_type = other DNA

SEQ ID NO: 76145 - DNA, 80 bp, synthetic construct; identical to SEQ ID NO: 14470
  source 1..80: mol_type = other DNA

SEQ ID NO: 76146 - DNA, 80 bp, synthetic construct; identical to SEQ ID NO: 42383
  source 1..80: mol_type = other DNA

SEQ ID NO: 76147 - DNA, 80 bp, synthetic construct; identical to SEQ ID NO: 42384
  source 1..80: mol_type = other DNA

SEQ ID NO: 76148 - DNA, 80 bp, synthetic construct; identical to SEQ ID NO: 42385
  source 1..80: mol_type = other DNA

SEQ ID NO: 76149 - DNA, 80 bp, synthetic construct; identical to SEQ ID NO: 14471
  source 1..80: mol_type = other DNA

SEQ ID NO: 76150 - DNA, 80 bp, synthetic construct; identical to SEQ ID NO: 42387
  source 1..80: mol_type = other DNA

SEQ ID NO: 76151 - DNA, 80 bp, synthetic construct; identical to SEQ ID NO: 42388
  source 1..80: mol_type = other DNA

SEQ ID NO: 76152 - DNA, 80 bp, synthetic construct; identical to SEQ ID NO: 42389
  source 1..80: mol_type = other DNA

SEQ ID NO: 76153 - DNA, 80 bp, synthetic construct; identical to SEQ ID NO: 14472
  source 1..80: mol_type = other DNA

SEQ ID NO: 76154 - DNA, 80 bp, synthetic construct; identical to SEQ ID NO: 42391
  source 1..80: mol_type = other DNA

SEQ ID NO: 76155 - DNA, 80 bp, synthetic construct; identical to SEQ ID NO: 42392
  source 1..80: mol_type = other DNA

SEQ ID NO: 76156 - DNA, 80 bp, synthetic construct; identical to SEQ ID NO: 42393
  source 1..80: mol_type = other DNA

SEQ ID NO: 76157 - DNA, 80 bp, synthetic construct; identical to SEQ ID NO: 14473
  source 1..80: mol_type = other DNA

SEQ ID NO: 76158 - DNA, 80 bp, synthetic construct; identical to SEQ ID NO: 42395
  source 1..80: mol_type = other DNA

SEQ ID NO: 76159 - DNA, 80 bp, synthetic construct; identical to SEQ ID NO: 42396
  source 1..80: mol_type = other DNA

SEQ ID NO: 76160 - DNA, 80 bp, synthetic construct; identical to SEQ ID NO: 42397
  source 1..80: mol_type = other DNA

SEQ ID NO: 76161 - DNA, 80 bp, synthetic construct; identical to SEQ ID NO: 42398
  source 1..80: mol_type = other DNA

SEQ ID NO: 76162 - DNA, 80 bp, synthetic construct; identical to SEQ ID NO: 14474
  source 1..80: mol_type = other DNA

SEQ ID NO: 76163 - DNA, 80 bp, synthetic construct; identical to SEQ ID NO: 42400
  source 1..80: mol_type = other DNA

SEQ ID NO: 76164 - DNA, 80 bp, synthetic construct; identical to SEQ ID NO: 42401
  source 1..80: mol_type = other DNA

SEQ ID NO: 76165 - DNA, 80 bp, synthetic construct; identical to SEQ ID NO: 14475
  source 1..80: mol_type = other DNA

SEQ ID NO: 76166 - DNA, 80 bp, synthetic construct; identical to SEQ ID NO: 42404
  source 1..80: mol_type = other DNA

SEQ ID NO: 76167 - DNA, 80 bp, synthetic construct; identical to SEQ ID NO: 42405
  source 1..80: mol_type = other DNA

SEQ ID NO: 76168 - DNA, 80 bp, synthetic construct; identical to SEQ ID NO: 14476
  source 1..80: mol_type = other DNA

SEQ ID NO: 76169 - DNA, 80 bp, synthetic construct; identical to SEQ ID NO: 42407
  source 1..80: mol_type = other DNA

SEQ ID NO: 76170 - DNA, 80 bp, synthetic construct; identical to SEQ ID NO: 42409
  source 1..80: mol_type = other DNA

SEQ ID NO: 76171 - DNA, 80 bp, synthetic construct; identical to SEQ ID NO: 14477
  source 1..80: mol_type = other DNA

SEQ ID NO: 76172 - DNA, 80 bp, synthetic construct; identical to SEQ ID NO: 42411
  source 1..80: mol_type = other DNA

SEQ ID NO: 76173 - DNA, 80 bp, synthetic construct; identical to SEQ ID NO: 42412
  source 1..80: mol_type = other DNA

SEQ ID NO: 76174 - DNA, 80 bp, synthetic construct; identical to SEQ ID NO: 42413
  source 1..80: mol_type = other DNA

SEQ ID NO: 76175 - DNA, 80 bp, synthetic construct; identical to SEQ ID NO: 14478
  source 1..80: mol_type = other DNA

SEQ ID NO: 76176 - DNA, 80 bp, synthetic construct; identical to SEQ ID NO: 42415
  source 1..80: mol_type = other DNA

SEQ ID NO: 76177 - DNA, 80 bp, synthetic construct; identical to SEQ ID NO: 42416
  source 1..80: mol_type = other DNA

SEQ ID NO: 76178 - DNA, 80 bp, synthetic construct; identical to SEQ ID NO: 42417
  source 1..80: mol_type = other DNA

SEQ ID NO: 76179 - DNA, 80 bp, synthetic construct; identical to SEQ ID NO: 14479
  source 1..80: mol_type = other DNA

SEQ ID NO: 76180 - DNA, 80 bp, synthetic construct; identical to SEQ ID NO: 42420
  source 1..80: mol_type = other DNA

SEQ ID NO: 76181 - DNA, 80 bp, synthetic construct; identical to SEQ ID NO: 42421
  source 1..80: mol_type = other DNA

SEQ ID NO: 76182 - DNA, 80 bp, synthetic construct; identical to SEQ ID NO: 14480
  source 1..80: mol_type = other DNA

SEQ ID NO: 76183 - DNA, 80 bp, synthetic construct; identical to SEQ ID NO: 42423
  source 1..80: mol_type = other DNA

SEQ ID NO: 76184 - DNA, 80 bp, synthetic construct; identical to SEQ ID NO: 42424
  source 1..80: mol_type = other DNA

SEQ ID NO: 76185 - DNA, 80 bp, synthetic construct; identical to SEQ ID NO: 42425
  source 1..80: mol_type = other DNA

SEQ ID NO: 76186 - DNA, 80 bp, synthetic construct; identical to SEQ ID NO: 14481
  source 1..80: mol_type = other DNA

SEQ ID NO: 76187 - DNA, 80 bp, synthetic construct; identical to SEQ ID NO: 42428
  source 1..80: mol_type = other DNA

SEQ ID NO: 76188 - DNA, 80 bp, synthetic construct; identical to SEQ ID NO: 42429
  source 1..80: mol_type = other DNA

SEQ ID NO: 76189 - DNA, 80 bp, synthetic construct; identical to SEQ ID NO: 42430
  source 1..80: mol_type = other DNA

SEQ ID NO: 76190 - DNA, 80 bp, synthetic construct; identical to SEQ ID NO: 14482
  source 1..80: mol_type = other DNA

SEQ ID NO: 76191 - DNA, 80 bp, synthetic construct; identical to SEQ ID NO: 42432
  source 1..80: mol_type = other DNA

SEQ ID NO: 76192 - DNA, 80 bp, synthetic construct; identical to SEQ ID NO: 42433
  source 1..80: mol_type = other DNA

SEQ ID NO: 76193 - DNA, 80 bp, synthetic construct; identical to SEQ ID NO: 42434
  source 1..80: mol_type = other DNA

SEQ ID NO: 76194 - DNA, 80 bp, synthetic construct; identical to SEQ ID NO: 14483
  source 1..80: mol_type = other DNA

SEQ ID NO: 76195 - DNA, 80 bp, synthetic construct; identical to SEQ ID NO: 42436
  source 1..80: mol_type = other DNA

SEQ ID NO: 76196 - DNA, 80 bp, synthetic construct; identical to SEQ ID NO: 42437
  source 1..80: mol_type = other DNA

SEQ ID NO: 76197 - DNA, 80 bp, synthetic construct; identical to SEQ ID NO: 42438
  source 1..80: mol_type = other DNA

SEQ ID NO: 76198 - DNA, 80 bp, synthetic construct; identical to SEQ ID NO: 14484
  source 1..80: mol_type = other DNA

SEQ ID NO: 76199 - DNA, 80 bp, synthetic construct; identical to SEQ ID NO: 42440
  source 1..80: mol_type = other DNA

SEQ ID NO: 76200 - DNA, 80 bp, synthetic construct; identical to SEQ ID NO: 42441
  source 1..80: mol_type = other DNA

SEQ ID NO: 76201 - DNA, 80 bp, synthetic construct; identical to SEQ ID NO: 42442
  source 1..80: mol_type = other DNA

SEQ ID NO: 76202 - DNA, 80 bp, synthetic construct; identical to SEQ ID NO: 14485
  source 1..80: mol_type = other DNA

SEQ ID NO: 76203 - DNA, 80 bp, synthetic construct; identical to SEQ ID NO: 42444
  source 1..80: mol_type = other DNA

SEQ ID NO: 76204 - DNA, 80 bp, synthetic construct; identical to SEQ ID NO: 42445
  source 1..80: mol_type = other DNA

SEQ ID NO: 76205 - DNA, 80 bp, synthetic construct; identical to SEQ ID NO: 14486
  source 1..80: mol_type = other DNA

SEQ ID NO: 76206 - DNA, 80 bp, synthetic construct; identical to SEQ ID NO: 42447
  source 1..80: mol_type = other DNA

SEQ ID NO: 76207 - DNA, 80 bp, synthetic construct; identical to SEQ ID NO: 42448
  source 1..80: mol_type = other DNA

SEQ ID NO: 76208 - DNA, 80 bp, synthetic construct; identical to SEQ ID NO: 42449
  source 1..80: mol_type = other DNA

SEQ ID NO: 76209 - DNA, 80 bp, synthetic construct; identical to SEQ ID NO: 42450
  source 1..80: mol_type = other DNA

SEQ ID NO: 76210 - DNA, 80 bp, synthetic construct; identical to SEQ ID NO: 14487
  source 1..80: mol_type = other DNA

SEQ ID NO: 76211 - DNA, 80 bp, synthetic construct; identical to SEQ ID NO: 42452
  source 1..80: mol_type = other DNA

SEQ ID NO: 76212 - DNA, 80 bp, synthetic construct; identical to SEQ ID NO: 42453
  source 1..80: mol_type = other DNA

SEQ ID NO: 76213 - DNA, 80 bp, synthetic construct; identical to SEQ ID NO: 42454
  source 1..80: mol_type = other DNA

SEQ ID NO: 76214 - DNA, 80 bp, synthetic construct; identical to SEQ ID NO: 42455
  source 1..80: mol_type = other DNA

SEQ ID NO: 76215 - DNA, 80 bp, synthetic construct; identical to SEQ ID NO: 14488
  source 1..80: mol_type = other DNA

SEQ ID NO: 76216 - DNA, 80 bp, synthetic construct; identical to SEQ ID NO: 42457
  source 1..80: mol_type = other DNA

SEQ ID NO: 76217 - DNA, 80 bp, synthetic construct; identical to SEQ ID NO: 42458
  source 1..80: mol_type = other DNA

SEQ ID NO: 76218 - DNA, 80 bp, synthetic construct; identical to SEQ ID NO: 14489
  source 1..80: mol_type = other DNA

SEQ ID NO: 76219 - DNA, 80 bp, synthetic construct; identical to SEQ ID NO: 42460
  source 1..80: mol_type = other DNA

SEQ ID NO: 76220 - DNA, 80 bp, synthetic construct; identical to SEQ ID NO: 42461
  source 1..80: mol_type = other DNA

SEQ ID NO: 76221 - DNA, 80 bp, synthetic construct; identical to SEQ ID NO: 14490
  source 1..80: mol_type = other DNA

SEQ ID NO: 76222 - DNA, 80 bp, synthetic construct; identical to SEQ ID NO: 42463
  source 1..80: mol_type = other DNA

SEQ ID NO: 76223 - DNA, 80 bp, synthetic construct; identical to SEQ ID NO: 42464
  source 1..80: mol_type = other DNA

SEQ ID NO: 76224 - DNA, 80 bp, synthetic construct; identical to SEQ ID NO: 42465
  source 1..80: mol_type = other DNA

SEQ ID NO: 76225 - DNA, 80 bp, synthetic construct; identical to SEQ ID NO: 42466
  source 1..80: mol_type = other DNA

SEQ ID NO: 76226 - DNA, 80 bp, synthetic construct; identical to SEQ ID NO: 14491
  source 1..80: mol_type = other DNA

SEQ ID NO: 76227 - DNA, 80 bp, synthetic construct; identical to SEQ ID NO: 42468
  source 1..80: mol_type = other DNA

SEQ ID NO: 76228 - DNA, 80 bp, synthetic construct; identical to SEQ ID NO: 42469
  source 1..80: mol_type = other DNA

SEQ ID NO: 76229 - DNA, 80 bp, synthetic construct; identical to SEQ ID NO: 14492
  source 1..80: mol_type = other DNA

SEQ ID NO: 76230 - DNA, 80 bp, synthetic construct; identical to SEQ ID NO: 42471
  source 1..80: mol_type = other DNA

SEQ ID NO: 76231 - DNA, 80 bp, synthetic construct; identical to SEQ ID NO: 42472
  source 1..80: mol_type = other DNA

SEQ ID NO: 76232 - DNA, 80 bp, synthetic construct; identical to SEQ ID NO: 42473
  source 1..80: mol_type = other DNA

SEQ ID NO: 76233 - DNA, 80 bp, synthetic construct; identical to SEQ ID NO: 42474
  source 1..80: mol_type = other DNA

SEQ ID NO: 76234 - DNA, 80 bp, synthetic construct; identical to SEQ ID NO: 14493
  source 1..80: mol_type = other DNA

SEQ ID NO: 76235 - DNA, 80 bp, synthetic construct; identical to SEQ ID NO: 42476
  source 1..80: mol_type = other DNA

SEQ ID NO: 76236 - DNA, 80 bp, synthetic construct; identical to SEQ ID NO: 42477
  source 1..80: mol_type = other DNA

SEQ ID NO: 76237 - DNA, 80 bp, synthetic construct; identical to SEQ ID NO: 42478
  source 1..80: mol_type = other DNA

SEQ ID NO: 76238 - DNA, 80 bp, synthetic construct; identical to SEQ ID NO: 14494
  source 1..80: mol_type = other DNA

SEQ ID NO: 76239 - DNA, 80 bp, synthetic construct; identical to SEQ ID NO: 42480
  source 1..80: mol_type = other DNA

SEQ ID NO: 76240 - DNA, 80 bp, synthetic construct; identical to SEQ ID NO: 42481
  source 1..80: mol_type = other DNA

SEQ ID NO: 76241 - DNA, 80 bp, synthetic construct; identical to SEQ ID NO: 14495
  source 1..80: mol_type = other DNA

SEQ ID NO: 76242 - DNA, 80 bp, synthetic construct; identical to SEQ ID NO: 42483
  source 1..80: mol_type = other DNA

SEQ ID NO: 76243 - DNA, 80 bp, synthetic construct; identical to SEQ ID NO: 42484
  source 1..80: mol_type = other DNA

SEQ ID NO: 76244 - DNA, 80 bp, synthetic construct; identical to SEQ ID NO: 42485
  source 1..80: mol_type = other DNA

SEQ ID NO: 76245 - DNA, 80 bp, synthetic construct; identical to SEQ ID NO: 14496
  source 1..80: mol_type = other DNA

SEQ ID NO: 76246 - DNA, 80 bp, synthetic construct; identical to SEQ ID NO: 42487
  source 1..80: mol_type = other DNA

SEQ ID NO: 76247 - DNA, 80 bp, synthetic construct; identical to SEQ ID NO: 42488
  source 1..80: mol_type = other DNA

SEQ ID NO: 76248 - DNA, 80 bp, synthetic construct; identical to SEQ ID NO: 42489
  source 1..80: mol_type = other DNA

SEQ ID NO: 76249 - DNA, 80 bp, synthetic construct; identical to SEQ ID NO: 42490
  source 1..80: mol_type = other DNA

SEQ ID NO: 76250 - DNA, 80 bp, synthetic construct; identical to SEQ ID NO: 14497
  source 1..80: mol_type = other DNA

SEQ ID NO: 76251 - DNA, 80 bp, synthetic construct; identical to SEQ ID NO: 42492
  source 1..80: mol_type = other DNA

SEQ ID NO: 76252 - DNA, 80 bp, synthetic construct; identical to SEQ ID NO: 42493
  source 1..80: mol_type = other DNA

SEQ ID NO: 76253 - DNA, 80 bp, synthetic construct; identical to SEQ ID NO: 42494
  source 1..80: mol_type = other DNA

SEQ ID NO: 76254 - DNA, 80 bp, synthetic construct; identical to SEQ ID NO: 14498
  source 1..80: mol_type = other DNA

SEQ ID NO: 76255 - DNA, 80 bp, synthetic construct; identical to SEQ ID NO: 42496
  source 1..80: mol_type = other DNA

SEQ ID NO: 76256 - DNA, 80 bp, synthetic construct; identical to SEQ ID NO: 42497
  source 1..80: mol_type = other DNA

SEQ ID NO: 76257 - DNA, 80 bp, synthetic construct; identical to SEQ ID NO: 42498
  source 1..80: mol_type = other DNA

SEQ ID NO: 76258 - DNA, 80 bp, synthetic construct; identical to SEQ ID NO: 14499
  source 1..80: mol_type = other DNA

SEQ ID NO: 76259 - DNA, 80 bp, synthetic construct; identical to SEQ ID NO: 42500
  source 1..80: mol_type = other DNA

SEQ ID NO: 76260 - DNA, 80 bp, synthetic construct; identical to SEQ ID NO: 42501
  source 1..80: mol_type = other DNA

SEQ ID NO: 76261 - DNA, 80 bp, synthetic construct; identical to SEQ ID NO: 14500
  source 1..80: mol_type = other DNA

SEQ ID NO: 76262 - DNA, 80 bp, synthetic construct; identical to SEQ ID NO: 42503
  source 1..80: mol_type = other DNA

SEQ ID NO: 76263 - DNA, 80 bp, synthetic construct; identical to SEQ ID NO: 42504
  source 1..80: mol_type = other DNA

SEQ ID NO: 76264 - DNA, 80 bp, synthetic construct; identical to SEQ ID NO: 14501
  source 1..80: mol_type = other DNA

SEQ ID NO: 76265 - DNA, 80 bp, synthetic construct; identical to SEQ ID NO: 42506
  source 1..80: mol_type = other DNA

SEQ ID NO: 76266 - DNA, 80 bp, synthetic construct; identical to SEQ ID NO: 42507
  source 1..80: mol_type = other DNA

SEQ ID NO: 76267 - DNA, 80 bp, synthetic construct; identical to SEQ ID NO: 42508
  source 1..80: mol_type = other DNA

SEQ ID NO: 76268 - DNA, 80 bp, synthetic construct; identical to SEQ ID NO: 14502
  source 1..80: mol_type = other DNA

SEQ ID NO: 76269 - DNA, 80 bp, synthetic construct; identical to SEQ ID NO: 42510
  source 1..80: mol_type = other DNA

SEQ ID NO: 76270 - DNA, 80 bp, synthetic construct; identical to SEQ ID NO: 42511
  source 1..80: mol_type = other DNA

SEQ ID NO: 76271 - DNA, 80 bp, synthetic construct; identical to SEQ ID NO: 42512
  source 1..80: mol_type = other DNA

SEQ ID NO: 76272 - DNA, 80 bp, synthetic construct; identical to SEQ ID NO: 14503
  source 1..80: mol_type = other DNA

SEQ ID NO: 76273 - DNA, 80 bp, synthetic construct; identical to SEQ ID NO: 42514
  source 1..80: mol_type = other DNA

SEQ ID NO: 76274 - DNA, 80 bp, synthetic construct; identical to SEQ ID NO: 42515
  source 1..80: mol_type = other DNA

SEQ ID NO: 76275 - DNA, 80 bp, synthetic construct; identical to SEQ ID NO: 42516
  source 1..80: mol_type = other DNA

SEQ ID NO: 76276 - DNA, 80 bp, synthetic construct; identical to SEQ ID NO: 42517
  source 1..80: mol_type = other DNA

SEQ ID NO: 76277 - DNA, 80 bp, synthetic construct; identical to SEQ ID NO: 14504
  source 1..80: mol_type = other DNA

SEQ ID NO: 76278 - DNA, 80 bp, synthetic construct; identical to SEQ ID NO: 42519
  source 1..80: mol_type = other DNA

SEQ ID NO: 76279 - DNA, 80 bp, synthetic construct; identical to SEQ ID NO: 42520
  source 1..80: mol_type = other DNA

SEQ ID NO: 76280 - DNA, 80 bp, synthetic construct; identical to SEQ ID NO: 42521
  source 1..80: mol_type = other DNA

SEQ ID NO: 76281 - DNA, 80 bp, synthetic construct; identical to SEQ ID NO: 14505
  source 1..80: mol_type = other DNA

SEQ ID NO: 76282 - DNA, 80 bp, synthetic construct; identical to SEQ ID NO: 42523
  source 1..80: mol_type = other DNA

SEQ ID NO: 76283 - DNA, 80 bp, synthetic construct; identical to SEQ ID NO: 42524
  source 1..80: mol_type = other DNA

SEQ ID NO: 76284 - DNA, 80 bp, synthetic construct; identical to SEQ ID NO: 42525
  source 1..80: mol_type = other DNA

SEQ ID NO: 76285 - DNA, 80 bp, synthetic construct; identical to SEQ ID NO: 14506
  source 1..80: mol_type = other DNA

SEQ ID NO: 76286 - DNA, 80 bp, synthetic construct; identical to SEQ ID NO: 42527
  source 1..80: mol_type = other DNA

SEQ ID NO: 76287 - DNA, 80 bp, synthetic construct; identical to SEQ ID NO: 42528
  source 1..80: mol_type = other DNA

SEQ ID NO: 76288 - DNA, 80 bp, synthetic construct; identical to SEQ ID NO: 14507
  source 1..80: mol_type = other DNA

SEQ ID NO: 76289 - DNA, 80 bp, synthetic construct; identical to SEQ ID NO: 42530
  source 1..80: mol_type = other DNA

SEQ ID NO: 76290 - DNA, 80 bp, synthetic construct; identical to SEQ ID NO: 42531
  source 1..80: mol_type = other DNA

SEQ ID NO: 76291 - DNA, 80 bp, synthetic construct; identical to SEQ ID NO: 42532
  source 1..80: mol_type = other DNA

SEQ ID NO: 76292 - DNA, 80 bp, synthetic construct; identical to SEQ ID NO: 14508
  source 1..80: mol_type = other DNA

SEQ ID NO: 76293 - DNA, 80 bp, synthetic construct; identical to SEQ ID NO: 42534
  source 1..80: mol_type = other DNA

SEQ ID NO: 76294 - DNA, 80 bp, synthetic construct; identical to SEQ ID NO: 42535
  source 1..80: mol_type = other DNA

SEQ ID NO: 76295 - DNA, 80 bp, synthetic construct; identical to SEQ ID NO: 42536
  source 1..80: mol_type = other DNA

SEQ ID NO: 76296 - DNA, 80 bp, synthetic construct; identical to SEQ ID NO: 42537
  source 1..80: mol_type = other DNA

SEQ ID NO: 76297 - DNA, 80 bp, synthetic construct; identical to SEQ ID NO: 14509
  source 1..80: mol_type = other DNA

SEQ ID NO: 76298 - DNA, 80 bp, synthetic construct; identical to SEQ ID NO: 42539
  source 1..80: mol_type = other DNA

SEQ ID NO: 76299 - DNA, 80 bp, synthetic construct; identical to SEQ ID NO: 42540
  source 1..80: mol_type = other DNA

SEQ ID NO: 76300 - DNA, 80 bp, synthetic construct; identical to SEQ ID NO: 14510
  source 1..80: mol_type = other DNA

SEQ ID NO: 76301 - DNA, 80 bp, synthetic construct; identical to SEQ ID NO: 42542
  source 1..80: mol_type = other DNA

SEQ ID NO: 76302 - DNA, 80 bp, synthetic construct; identical to SEQ ID NO: 42543
  source 1..80: mol_type = other DNA

SEQ ID NO: 76303 - DNA, 80 bp, synthetic construct; identical to SEQ ID NO: 42544
  source 1..80: mol_type = other DNA

SEQ ID NO: 76304 - DNA, 80 bp, synthetic construct; identical to SEQ ID NO: 14511
  source 1..80: mol_type = other DNA

SEQ ID NO: 76305 - DNA, 80 bp, synthetic construct; identical to SEQ ID NO: 42546
  source 1..80: mol_type = other DNA

SEQ ID NO: 76306 - DNA, 80 bp, synthetic construct; identical to SEQ ID NO: 42547
  source 1..80: mol_type = other DNA

SEQ ID NO: 76307 - DNA, 80 bp, synthetic construct; identical to SEQ ID NO: 42548
  source 1..80: mol_type = other DNA

SEQ ID NO: 76308 - DNA, 80 bp, synthetic construct; identical to SEQ ID NO: 42549
  source 1..80: mol_type = other DNA

SEQ ID NO: 76309 - DNA, 80 bp, synthetic construct; identical to SEQ ID NO: 14512
  source 1..80: mol_type = other DNA

SEQ ID NO: 76310 - DNA, 80 bp, synthetic construct; identical to SEQ ID NO: 42551
  source 1..80: mol_type = other DNA

SEQ ID NO: 76311 - DNA, 80 bp, synthetic construct; identical to SEQ ID NO: 42552
  source 1..80: mol_type = other DNA

SEQ ID NO: 76312 - DNA, 80 bp, synthetic construct; identical to SEQ ID NO: 14513
  source 1..80: mol_type = other DNA

SEQ ID NO: 76313 - DNA, 80 bp, synthetic construct; identical to SEQ ID NO: 42554
  source 1..80: mol_type = other DNA

SEQ ID NO: 76314 - DNA, 80 bp, synthetic construct; identical to SEQ ID NO: 42555
  source 1..80: mol_type = other DNA

SEQ ID NO: 76315 - DNA, 80 bp, synthetic construct; identical to SEQ ID NO: 42556
  source 1..80: mol_type = other DNA

SEQ ID NO: 76316 - DNA, 80 bp, synthetic construct; identical to SEQ ID NO: 42557
  source 1..80: mol_type = other DNA

SEQ ID NO: 76317 - DNA, 80 bp, synthetic construct; identical to SEQ ID NO: 14514
  source 1..80: mol_type = other DNA

SEQ ID NO: 76318 - DNA, 80 bp, synthetic construct; identical to SEQ ID NO: 42559
  source 1..80: mol_type = other DNA

SEQ ID NO: 76319 - DNA, 80 bp, synthetic construct; identical to SEQ ID NO: 42560
  source 1..80: mol_type = other DNA

SEQ ID NO: 76320 - DNA, 80 bp, synthetic construct; identical to SEQ ID NO: 42561
  source 1..80: mol_type = other DNA

SEQ ID NO: 76321 - DNA, 80 bp, synthetic construct; identical to SEQ ID NO: 14515
  source 1..80: mol_type = other DNA

SEQ ID NO: 76322 - DNA, 80 bp, synthetic construct; identical to SEQ ID NO: 42563
  source 1..80: mol_type = other DNA

SEQ ID NO: 76323 - DNA, 80 bp, synthetic construct; identical to SEQ ID NO: 42564
  source 1..80: mol_type = other DNA

SEQ ID NO: 76324 - DNA, 80 bp, synthetic construct; identical to SEQ ID NO: 14516
  source 1..80: mol_type = other DNA

SEQ ID NO: 76325 - DNA, 80 bp, synthetic construct; identical to SEQ ID NO: 42567
  source 1..80: mol_type = other DNA

SEQ ID NO: 76326 - DNA, 80 bp, synthetic construct; identical to SEQ ID NO: 42568
  source 1..80: mol_type = other DNA

SEQ ID NO: 76327 - DNA, 80 bp, synthetic construct; identical to SEQ ID NO: 14517
  source 1..80: mol_type = other DNA

SEQ ID NO: 76328 - DNA, 80 bp, synthetic construct; identical to SEQ ID NO: 42570
  source 1..80: mol_type = other DNA

SEQ ID NO: 76329 - DNA, 80 bp, synthetic construct; identical to SEQ ID NO: 42571
  source 1..80: mol_type = other DNA

SEQ ID NO: 76330 - DNA, 80 bp, synthetic construct; identical to SEQ ID NO: 42572
  source 1..80: mol_type = other DNA

SEQ ID NO: 76331 - DNA, 80 bp, synthetic construct; identical to SEQ ID NO: 14518
  source 1..80: mol_type = other DNA

SEQ ID NO: 76332 - DNA, 80 bp, synthetic construct; identical to SEQ ID NO: 42574
  source 1..80: mol_type = other DNA

SEQ ID NO: 76333 - DNA, 80 bp, synthetic construct; identical to SEQ ID NO: 42575
  source 1..80: mol_type = other DNA

SEQ ID NO: 76334 - DNA, 80 bp, synthetic construct; identical to SEQ ID NO: 42576
  source 1..80: mol_type = other DNA

SEQ ID NO: 76335 - DNA, 80 bp, synthetic construct; identical to SEQ ID NO: 14519
  source 1..80: mol_type = other DNA

SEQ ID NO: 76336 - DNA, 80 bp, synthetic construct; identical to SEQ ID NO: 42578
  source 1..80: mol_type = other DNA

SEQ ID NO: 76337 - DNA, 80 bp, synthetic construct; identical to SEQ ID NO: 42579
  source 1..80: mol_type = other DNA

SEQ ID NO: 76338 - DNA, 80 bp, synthetic construct; identical to SEQ ID NO: 42580
  source 1..80: mol_type = other DNA

SEQ ID NO: 76339 - DNA, 80 bp, synthetic construct; identical to SEQ ID NO: 42581
  source 1..80: mol_type = other DNA

SEQ ID NO: 76340 - DNA, 80 bp, synthetic construct; identical to SEQ ID NO: 14520
  source 1..80: mol_type = other DNA

SEQ ID NO: 76341 - DNA, 80 bp, synthetic construct; identical to SEQ ID NO: 42583
  source 1..80: mol_type = other DNA

SEQ ID NO: 76342 - DNA, 80 bp, synthetic construct; identical to SEQ ID NO: 42584
  source 1..80: mol_type = other DNA

SEQ ID NO: 76343 - DNA, 80 bp, synthetic construct; identical to SEQ ID NO: 42585
  source 1..80: mol_type = other DNA

SEQ ID NO: 76344 - DNA, 80 bp, synthetic construct; identical to SEQ ID NO: 14521
  source 1..80: mol_type = other DNA

SEQ ID NO: 76345 - DNA, 80 bp, synthetic construct; identical to SEQ ID NO: 42587
  source 1..80: mol_type = other DNA

SEQ ID NO: 76346 - DNA, 80 bp, synthetic construct; identical to SEQ ID NO: 42588
  source 1..80: mol_type = other DNA

SEQ ID NO: 76347 - DNA, 80 bp, synthetic construct; identical to SEQ ID NO: 42589
  source 1..80: mol_type = other DNA

SEQ ID NO: 76348 - DNA, 80 bp, synthetic construct; identical to SEQ ID NO: 14522
  source 1..80: mol_type = other DNA

SEQ ID NO: 76349 - DNA, 80 bp, synthetic construct; identical to SEQ ID NO: 42591
  source 1..80: mol_type = other DNA

SEQ ID NO: 76350 - DNA, 80 bp, synthetic construct; identical to SEQ ID NO: 42592
  source 1..80: mol_type = other DNA

SEQ ID NO: 76351 - DNA, 80 bp, synthetic construct; identical to SEQ ID NO: 42593
  source 1..80: mol_type = other DNA

SEQ ID NO: 76352 - DNA, 80 bp, synthetic construct; identical to SEQ ID NO: 42595
  source 1..80: mol_type = other DNA

SEQ ID NO: 76353 - DNA, 80 bp, synthetic construct; identical to SEQ ID NO: 42596
  source 1..80: mol_type = other DNA

SEQ ID NO: 76354 - DNA, 80 bp, synthetic construct; identical to SEQ ID NO: 42597
  source 1..80: mol_type = other DNA

SEQ ID NO: 76355 - DNA, 80 bp, synthetic construct; identical to SEQ ID NO: 14524
  source 1..80: mol_type = other DNA

SEQ ID NO: 76356 - DNA, 80 bp, synthetic construct; identical to SEQ ID NO: 42599
  source 1..80: mol_type = other DNA

SEQ ID NO: 76357 - DNA, 80 bp, synthetic construct; identical to SEQ ID NO: 42600
  source 1..80: mol_type = other DNA

SEQ ID NO: 76358 - DNA, 80 bp, synthetic construct; identical to SEQ ID NO: 42601
  source 1..80: mol_type = other DNA

SEQ ID NO: 76359 - DNA, 80 bp, synthetic construct; identical to SEQ ID NO: 14525
  source 1..80: mol_type = other DNA

SEQ ID NO: 76360 - DNA, 80 bp, synthetic construct; identical to SEQ ID NO: 42603
  source 1..80: mol_type = other DNA

SEQ ID NO: 76361 - DNA, 80 bp, synthetic construct; identical to SEQ ID NO: 42604
  source 1..80: mol_type = other DNA

SEQ ID NO: 76362 - DNA, 80 bp, synthetic construct; identical to SEQ ID NO: 42605
  source 1..80: mol_type = other DNA

SEQ ID NO: 76363 - DNA, 80 bp, synthetic construct; identical to SEQ ID NO: 14526
  source 1..80: mol_type = other DNA

SEQ ID NO: 76364 - DNA, 80 bp, synthetic construct; identical to SEQ ID NO: 42608
  source 1..80: mol_type = other DNA

SEQ ID NO: 76365 - DNA, 80 bp, synthetic construct; identical to SEQ ID NO: 14527
  source 1..80: mol_type = other DNA

SEQ ID NO: 76366 - DNA, 80 bp, synthetic construct; identical to SEQ ID NO: 42610
  source 1..80: mol_type = other DNA

SEQ ID NO: 76367 - DNA, 80 bp, synthetic construct; identical to SEQ ID NO: 42611
  source 1..80: mol_type = other DNA

SEQ ID NO: 76368 - DNA, 80 bp, synthetic construct; identical to SEQ ID NO: 42612
  source 1..80: mol_type = other DNA

SEQ ID NO: 76369 - DNA, 80 bp, synthetic construct; identical to SEQ ID NO: 14528
  source 1..80: mol_type = other DNA

SEQ ID NO: 76370 - DNA, 80 bp, synthetic construct; identical to SEQ ID NO: 42614
  source 1..80: mol_type = other DNA

SEQ ID NO: 76371 - DNA, 80 bp, synthetic construct; identical to SEQ ID NO: 42615
  source 1..80: mol_type = other DNA

SEQ ID NO: 76372 - DNA, 80 bp, synthetic construct; identical to SEQ ID NO: 42616
  source 1..80: mol_type = other DNA

SEQ ID NO: 76373 - DNA, 80 bp, synthetic construct; identical to SEQ ID NO: 42617
  source 1..80: mol_type = other DNA

SEQ ID NO: 76374 - DNA, 80 bp, synthetic construct; identical to SEQ ID NO: 14529
  source 1..80: mol_type = other DNA

SEQ ID NO: 76375 - DNA, 80 bp, synthetic construct; identical to SEQ ID NO: 42619
  source 1..80: mol_type = other DNA

SEQ ID NO: 76376 - DNA, 80 bp, synthetic construct; identical to SEQ ID NO: 42620
  source 1..80: mol_type = other DNA

SEQ ID NO: 76377 - DNA, 80 bp, synthetic construct; identical to SEQ ID NO: 42621
  source 1..80: mol_type = other DNA

SEQ ID NO: 76378 - DNA, 80 bp, synthetic construct; identical to SEQ ID NO: 14530
  source 1..80: mol_type = other DNA

SEQ ID NO: 76379 - DNA, 80 bp, synthetic construct; identical to SEQ ID NO: 42623
  source 1..80: mol_type = other DNA

SEQ ID NO: 76380 - DNA, 80 bp, synthetic construct; identical to SEQ ID NO: 42624
  source 1..80: mol_type = other DNA

SEQ ID NO: 76381 - DNA, 80 bp, synthetic construct; identical to SEQ ID NO: 42625
  source 1..80: mol_type = other DNA

SEQ ID NO: 76382 - DNA, 80 bp, synthetic construct; identical to SEQ ID NO: 42626
  source 1..80: mol_type = other DNA

SEQ ID NO: 76383 - DNA, 80 bp, synthetic construct; identical to SEQ ID NO: 14531
  source 1..80: mol_type = other DNA

SEQ ID NO: 76384 - DNA, 80 bp, synthetic construct; identical to SEQ ID NO: 42628
  source 1..80: mol_type = other DNA

SEQ ID NO: 76385 - DNA, 80 bp, synthetic construct; identical to SEQ ID NO: 42629
  source 1..80: mol_type = other DNA

SEQ ID NO: 76386 - DNA, 80 bp, synthetic construct; identical to SEQ ID NO: 42630
  source 1..80: mol_type = other DNA

SEQ ID NO: 76387 - DNA, 80 bp, synthetic construct; identical to SEQ ID NO: 14532
  source 1..80: mol_type = other DNA

SEQ ID NO: 76388 - DNA, 80 bp, synthetic construct; identical to SEQ ID NO: 42632
  source 1..80: mol_type = other DNA

SEQ ID NO: 76389 - DNA, 80 bp, synthetic construct; identical to SEQ ID NO: 42633
  source 1..80: mol_type = other DNA

SEQ ID NO: 76390 - DNA, 80 bp, synthetic construct; identical to SEQ ID NO: 14533
  source 1..80: mol_type = other DNA

SEQ ID NO: 76391 - DNA, 80 bp, synthetic construct; identical to SEQ ID NO: 42635
  source 1..80: mol_type = other DNA

SEQ ID NO: 76392 - DNA, 80 bp, synthetic construct; identical to SEQ ID NO: 42637
  source 1..80: mol_type = other DNA

SEQ ID NO: 76393 - DNA, 80 bp, synthetic construct; identical to SEQ ID NO: 14534
  source 1..80: mol_type = other DNA

SEQ ID NO: 76394 - DNA, 80 bp, synthetic construct; identical to SEQ ID NO: 42639
  source 1..80: mol_type = other DNA

SEQ ID NO: 76395 - DNA, 80 bp, synthetic construct; identical to SEQ ID NO: 42640
  source 1..80: mol_type = other DNA

SEQ ID NO: 76396 - DNA, 80 bp, synthetic construct; identical to SEQ ID NO: 42641
  source 1..80: mol_type = other DNA

SEQ ID NO: 76397 - DNA, 80 bp, synthetic construct; identical to SEQ ID NO: 14535
  source 1..80: mol_type = other DNA

SEQ ID NO: 76398 - DNA, 80 bp, synthetic construct; identical to SEQ ID NO: 42643
  source 1..80: mol_type = other DNA

SEQ ID NO: 76399 - DNA, 80 bp, synthetic construct; identical to SEQ ID NO: 42644
  source 1..80: mol_type = other DNA

SEQ ID NO: 76400 - DNA, 80 bp, synthetic construct; identical to SEQ ID NO: 42645
  source 1..80: mol_type = other DNA

SEQ ID NO: 76401 - DNA, 80 bp, synthetic construct; identical to SEQ ID NO: 14536
  source 1..80: mol_type = other DNA

SEQ ID NO: 76402 - DNA, 80 bp, synthetic construct; identical to SEQ ID NO: 42647
  source 1..80: mol_type = other DNA

SEQ ID NO: 76403 - DNA, 80 bp, synthetic construct; identical to SEQ ID NO: 42648
  source 1..80: mol_type = other DNA

SEQ ID NO: 76404 - DNA, 80 bp, synthetic construct; identical to SEQ ID NO: 42650
  source 1..80: mol_type = other DNA

SEQ ID NO: 76405 - DNA, 80 bp, synthetic construct; identical to SEQ ID NO: 14537
  source 1..80: mol_type = other DNA

SEQ ID NO: 76406 - DNA, 80 bp, synthetic construct; identical to SEQ ID NO: 42652
  source 1..80: mol_type = other DNA

SEQ ID NO: 76407 - DNA, 80 bp, synthetic construct; identical to SEQ ID NO: 42653
  source 1..80: mol_type = other DNA

SEQ ID NO: 76408 - DNA, 80 bp, synthetic construct; identical to SEQ ID NO: 14538
  source 1..80: mol_type = other DNA

SEQ ID NO: 76409 - DNA, 80 bp, synthetic construct; identical to SEQ ID NO: 42655
  source 1..80: mol_type = other DNA

SEQ ID NO: 76410 - DNA, 80 bp, synthetic construct; identical to SEQ ID NO: 42656
  source 1..80: mol_type = other DNA

SEQ ID NO: 76411 - DNA, 80 bp, synthetic construct; identical to SEQ ID NO: 42657
  source 1..80: mol_type = other DNA

SEQ ID NO: 76412 - DNA, 80 bp, synthetic construct; identical to SEQ ID NO: 14539
  source 1..80: mol_type = other DNA

SEQ ID NO: 76413 - DNA, 80 bp, synthetic construct; identical to SEQ ID NO: 42659
  source 1..80: mol_type = other DNA

SEQ ID NO: 76414 - DNA, 80 bp, synthetic construct; identical to SEQ ID NO: 42660
  source 1..80: mol_type = other DNA

SEQ ID NO: 76415 - DNA, 80 bp, synthetic construct; identical to SEQ ID NO: 42661
  source 1..80: mol_type = other DNA

SEQ ID NO: 76416 - DNA, 80 bp, synthetic construct; identical to SEQ ID NO: 42662
  source 1..80: mol_type = other DNA

SEQ ID NO: 76417 - DNA, 80 bp, synthetic construct; identical to SEQ ID NO: 14540
  source 1..80: mol_type = other DNA

SEQ ID NO: 76418 - DNA, 80 bp, synthetic construct; identical to SEQ ID NO: 42665
  source 1..80: mol_type = other DNA

SEQ ID NO: 76419 - DNA, 80 bp, synthetic construct; identical to SEQ ID NO: 14541
  source 1..80: mol_type = other DNA

SEQ ID NO: 76420 - DNA, 80 bp, synthetic construct; identical to SEQ ID NO: 42668
  source 1..80: mol_type = other DNA

SEQ ID NO: 76421 - DNA, 80 bp, synthetic construct; identical to SEQ ID NO: 42669
  source 1..80: mol_type = other DNA

SEQ ID NO: 76422 - DNA, 80 bp, synthetic construct; identical to SEQ ID NO: 42670
  source 1..80: mol_type = other DNA

SEQ ID NO: 76423 - DNA, 80 bp, synthetic construct; identical to SEQ ID NO: 14542
  source 1..80: mol_type = other DNA

SEQ ID NO: 76424 - DNA, 80 bp, synthetic construct; identical to SEQ ID NO: 42672
  source 1..80: mol_type = other DNA

SEQ ID NO: 76425 - DNA, 80 bp, synthetic construct; identical to SEQ ID NO: 42673
  source 1..80: mol_type = other DNA

SEQ ID NO: 76426 - DNA, 80 bp, synthetic construct; identical to SEQ ID NO: 14543
  source 1..80: mol_type = other DNA

SEQ ID NO: 76427 - DNA, 80 bp, synthetic construct; identical to SEQ ID NO: 42675
  source 1..80: mol_type = other DNA

SEQ ID NO: 76428 - DNA, 80 bp, synthetic construct; identical to SEQ ID NO: 42676
  source 1..80: mol_type = other DNA

SEQ ID NO: 76429 - DNA, 80 bp, synthetic construct; identical to SEQ ID NO: 42677
  source 1..80: mol_type = other DNA

SEQ ID NO: 76430 - DNA, 80 bp, synthetic construct; identical to SEQ ID NO: 14544
  source 1..80: mol_type = other DNA

SEQ ID NO: 76431 - DNA, 80 bp, synthetic construct; identical to SEQ ID NO: 42679
  source 1..80: mol_type = other DNA

SEQ ID NO: 76432 - DNA, 80 bp, synthetic construct; identical to SEQ ID NO: 42680
  source 1..80: mol_type = other DNA

SEQ ID NO: 76433 - DNA, 80 bp, synthetic construct; identical to SEQ ID NO: 42681
  source 1..80: mol_type = other DNA

SEQ ID NO: 76434 - DNA, 80 bp, synthetic construct; identical to SEQ ID NO: 14545
  source 1..80: mol_type = other DNA

SEQ ID NO: 76435 - DNA, 80 bp, synthetic construct; identical to SEQ ID NO: 42683
  source 1..80: mol_type = other DNA

SEQ ID NO: 76436 - DNA, 80 bp, synthetic construct; identical to SEQ ID NO: 42684
  source 1..80: mol_type = other DNA

SEQ ID NO: 76437 - DNA, 80 bp, synthetic construct; identical to SEQ ID NO: 42685
  source 1..80: mol_type = other DNA

SEQ ID NO: 76438 - DNA, 80 bp, synthetic construct; identical to SEQ ID NO: 14546
  source 1..80: mol_type = other DNA

SEQ ID NO: 76439 - DNA, 80 bp, synthetic construct; identical to SEQ ID NO: 42687
  source 1..80: mol_type = other DNA

SEQ ID NO: 76440 - DNA, 80 bp, synthetic construct; identical to SEQ ID NO: 42688
  source 1..80: mol_type = other DNA

SEQ ID NO: 76441 - DNA, 80 bp, synthetic construct; identical to SEQ ID NO: 42689
  source 1..80: mol_type = other DNA

SEQ ID NO: 76442 - DNA, 80 bp, synthetic construct; identical to SEQ ID NO: 14547
  source 1..80: mol_type = other DNA

SEQ ID NO: 76443 - DNA, 80 bp, synthetic construct; identical to SEQ ID NO: 42691
  source 1..80: mol_type = other DNA

SEQ ID NO: 76444 - DNA, 80 bp, synthetic construct; identical to SEQ ID NO: 42692
  source 1..80: mol_type = other DNA

SEQ ID NO: 76445 - DNA, 80 bp, synthetic construct; identical to SEQ ID NO: 14548
  source 1..80: mol_type = other DNA

SEQ ID NO: 76446 - DNA, 80 bp, synthetic construct; identical to SEQ ID NO: 42694
  source 1..80: mol_type = other DNA

SEQ ID NO: 76447 - DNA, 80 bp, synthetic construct; identical to SEQ ID NO: 42696
  source 1..80: mol_type = other DNA

SEQ ID NO: 76448 - DNA, 80 bp, synthetic construct; identical to SEQ ID NO: 14549
  source 1..80: mol_type = other DNA

SEQ ID NO: 76449 - DNA, 80 bp, synthetic construct; identical to SEQ ID NO: 42698
  source 1..80: mol_type = other DNA

SEQ ID NO: 76450 - DNA, 80 bp, synthetic construct; identical to SEQ ID NO: 42699
  source 1..80: mol_type = other DNA

SEQ ID NO: 76451 - DNA, 80 bp, synthetic construct; identical to SEQ ID NO: 42700
  source 1..80: mol_type = other DNA

SEQ ID NO: 76452 - DNA, 80 bp, synthetic construct; identical to SEQ ID NO: 14550
  source 1..80: mol_type = other DNA

SEQ ID NO: 76453 - DNA, 80 bp, synthetic construct; identical to SEQ ID NO: 42702
  source 1..80: mol_type = other DNA

SEQ ID NO: 76454 - DNA, 80 bp, synthetic construct; identical to SEQ ID NO: 42703
  source 1..80: mol_type = other DNA

SEQ ID NO: 76455 - DNA, 80 bp, synthetic construct; identical to SEQ ID NO: 42704
  source 1..80: mol_type = other DNA

SEQ ID NO: 76456 - DNA, 80 bp, synthetic construct; identical to SEQ ID NO: 42705
  source 1..80: mol_type = other DNA

SEQ ID NO: 76457 - DNA, 80 bp, synthetic construct; identical to SEQ ID NO: 14551
  source 1..80: mol_type = other DNA

SEQ ID NO: 76458 - DNA, 80 bp, synthetic construct; identical to SEQ ID NO: 42707
  source 1..80: mol_type = other DNA

SEQ ID NO: 76459 - DNA, 80 bp, synthetic construct; identical to SEQ ID NO: 14552
  source 1..80: mol_type = other DNA

SEQ ID NO: 76460 - DNA, 80 bp, synthetic construct; identical to SEQ ID NO: 42710
  source 1..80: mol_type = other DNA

SEQ ID NO: 76461 - DNA, 80 bp, synthetic construct; identical to SEQ ID NO: 42711
  source 1..80: mol_type = other DNA

SEQ ID NO: 76462 - DNA, 80 bp, synthetic construct; identical to SEQ ID NO: 42712
  source 1..80: mol_type = other DNA

SEQ ID NO: 76463 - DNA, 80 bp, synthetic construct; identical to SEQ ID NO: 42713
  source 1..80: mol_type = other DNA

SEQ ID NO: 76464 - DNA, 80 bp, synthetic construct; identical to SEQ ID NO: 14553
  source 1..80: mol_type = other DNA

SEQ ID NO: 76465 - DNA, 80 bp, synthetic construct; identical to SEQ ID NO: 42715
  source 1..80: mol_type = other DNA

SEQ ID NO: 76466 - DNA, 80 bp, synthetic construct; identical to SEQ ID NO: 42716
  source 1..80: mol_type = other DNA

SEQ ID NO: 76467 - DNA, 80 bp, synthetic construct; identical to SEQ ID NO: 14554
  source 1..80: mol_type = other DNA

SEQ ID NO: 76468 - DNA, 80 bp, synthetic construct; identical to SEQ ID NO: 42718
  source 1..80: mol_type = other DNA

SEQ ID NO: 76469 - DNA, 80 bp, synthetic construct; identical to SEQ ID NO: 42719
  source 1..80: mol_type = other DNA

SEQ ID NO: 76470 - DNA, 80 bp, synthetic construct; identical to SEQ ID NO: 42720
  source 1..80: mol_type = other DNA

SEQ ID NO: 76471 - DNA, 80 bp, synthetic construct; identical to SEQ ID NO: 14555
  source 1..80: mol_type = other DNA

SEQ ID NO: 76472 - DNA, 80 bp, synthetic construct; identical to SEQ ID NO: 42722
  source 1..80: mol_type = other DNA

SEQ ID NO: 76473 - DNA, 80 bp, synthetic construct; identical to SEQ ID NO: 42723
  source 1..80: mol_type = other DNA

SEQ ID NO: 76474 - DNA, 80 bp, synthetic construct; identical to SEQ ID NO: 42724
  source 1..80: mol_type = other DNA

SEQ ID NO: 76475 - DNA, 80 bp, synthetic construct; identical to SEQ ID NO: 42725
  source 1..80: mol_type = other DNA

SEQ ID NO: 76476 - DNA, 80 bp, synthetic construct; identical to SEQ ID NO: 14556
  source 1..80: mol_type = other DNA

SEQ ID NO: 76477 - DNA, 80 bp, synthetic construct; identical to SEQ ID NO: 42727
  source 1..80: mol_type = other DNA

SEQ ID NO: 76478 - DNA, 80 bp, synthetic construct; identical to SEQ ID NO: 42728
  source 1..80: mol_type = other DNA

SEQ ID NO: 76479 - DNA, 80 bp, synthetic construct; identical to SEQ ID NO: 42729
  source 1..80: mol_type = other DNA

SEQ ID NO: 76480 - DNA, 80 bp, synthetic construct; identical to SEQ ID NO: 42730
  source 1..80: mol_type = other DNA

SEQ ID NO: 76481 - DNA, 80 bp, synthetic construct; identical to SEQ ID NO: 14557
  source 1..80: mol_type = other DNA

SEQ ID NO: 76482 - DNA, 80 bp, synthetic construct; identical to SEQ ID NO: 42732
  source 1..80: mol_type = other DNA

SEQ ID NO: 76483 - DNA, 80 bp, synthetic construct; identical to SEQ ID NO: 42733
  source 1..80: mol_type = other DNA

SEQ ID NO: 76484 - DNA, 80 bp, synthetic construct; identical to SEQ ID NO: 42734
  source 1..80: mol_type = other DNA

SEQ ID NO: 76485 - DNA, 80 bp, synthetic construct; identical to SEQ ID NO: 14558
  source 1..80: mol_type = other DNA

SEQ ID NO: 76486 - DNA, 80 bp, synthetic construct; identical to SEQ ID NO: 42736
  source 1..80: mol_type = other DNA

SEQ ID NO: 76487 - DNA, 80 bp, synthetic construct; identical to SEQ ID NO: 42737
  source 1..80: mol_type = other DNA

SEQ ID NO: 76488 - DNA, 80 bp, synthetic construct; identical to SEQ ID NO: 42738
  source 1..80: mol_type = other DNA

SEQ ID NO: 76489 - DNA, 80 bp, synthetic construct; identical to SEQ ID NO: 14559
  source 1..80: mol_type = other DNA

SEQ ID NO: 76490 - DNA, 80 bp, synthetic construct; identical to SEQ ID NO: 42740
  source 1..80: mol_type = other DNA

SEQ ID NO: 76491 - DNA, 80 bp, synthetic construct; identical to SEQ ID NO: 42741
  source 1..80: mol_type = other DNA

SEQ ID NO: 76492 - DNA, 80 bp, synthetic construct; identical to SEQ ID NO: 42742
  source 1..80: mol_type = other DNA

SEQ ID NO: 76493 - DNA, 80 bp, synthetic construct; identical to SEQ ID NO: 42743
  source 1..80: mol_type = other DNA

SEQ ID NO: 76494 - DNA, 80 bp, synthetic construct; identical to SEQ ID NO: 14560
  source 1..80: mol_type = other DNA

SEQ ID NO: 76495 - DNA, 80 bp, synthetic construct; identical to SEQ ID NO: 42745
  source 1..80: mol_type = other DNA

SEQ ID NO: 76496 - DNA, 80 bp, synthetic construct; identical to SEQ ID NO: 42746
  source 1..80: mol_type = other DNA

SEQ ID NO: 76497 - DNA, 80 bp, synthetic construct; identical to SEQ ID NO: 42747
  source 1..80: mol_type = other DNA

SEQ ID NO: 76498 - DNA, 80 bp, synthetic construct; identical to SEQ ID NO: 14561
  source 1..80: mol_type = other DNA

SEQ ID NO: 76499 - DNA, 80 bp, synthetic construct; identical to SEQ ID NO: 42749
  source 1..80: mol_type = other DNA

SEQ ID NO: 76500 - DNA, 80 bp, synthetic construct; identical to SEQ ID NO: 42750
  source 1..80: mol_type = other DNA

SEQ ID NO: 76501 - DNA, 80 bp, synthetic construct; identical to SEQ ID NO: 42751
  source 1..80: mol_type = other DNA

SEQ ID NO: 76502 - DNA, 80 bp, synthetic construct; identical to SEQ ID NO: 14562
  source 1..80: mol_type = other DNA

SEQ ID NO: 76503 - DNA, 80 bp, synthetic construct; identical to SEQ ID NO: 42753
  source 1..80: mol_type = other DNA

SEQ ID NO: 76504 - DNA, 80 bp, synthetic construct; identical to SEQ ID NO: 42754
  source 1..80: mol_type = other DNA

SEQ ID NO: 76505 - DNA, 80 bp, synthetic construct; identical to SEQ ID NO: 14563
  source 1..80: mol_type = other DNA

SEQ ID NO: 76506 - DNA, 80 bp, synthetic construct; identical to SEQ ID NO: 42756
  source 1..80: mol_type = other DNA

SEQ ID NO: 76507 - DNA, 80 bp, synthetic construct; identical to SEQ ID NO: 42757
  source 1..80: mol_type = other DNA

SEQ ID NO: 76508 - DNA, 80 bp, synthetic construct; identical to SEQ ID NO: 42758
  source 1..80: mol_type = other DNA

SEQ ID NO: 76509 - DNA, 80 bp, synthetic construct; identical to SEQ ID NO: 42759
  source 1..80: mol_type = other DNA

SEQ ID NO: 76510 - DNA, 80 bp, synthetic construct; identical to SEQ ID NO: 14564
  source 1..80: mol_type = other DNA

SEQ ID NO: 76511 - DNA, 80 bp, synthetic construct; identical to SEQ ID NO: 42761
  source 1..80: mol_type = other DNA

SEQ ID NO: 76512 - DNA, 80 bp, synthetic construct; identical to SEQ ID NO: 42762
  source 1..80: mol_type = other DNA

SEQ ID NO: 76513 - DNA, 80 bp, synthetic construct; identical to SEQ ID NO: 14565
  source 1..80: mol_type = other DNA

SEQ ID NO: 76514 - DNA, 80 bp, synthetic construct; identical to SEQ ID NO: 42764
  source 1..80: mol_type = other DNA

SEQ ID NO: 76515 - DNA, 80 bp, synthetic construct; identical to SEQ ID NO: 42765
  source 1..80: mol_type = other DNA

SEQ ID NO: 76516 - DNA, 80 bp, synthetic construct; identical to SEQ ID NO: 42766
  source 1..80: mol_type = other DNA

SEQ ID NO: 76517 - DNA, 80 bp, synthetic construct; identical to SEQ ID NO: 42767
  source 1..80: mol_type = other DNA

SEQ ID NO: 76518 - DNA, 80 bp, synthetic construct; identical to SEQ ID NO: 14566
  source 1..80: mol_type = other DNA

SEQ ID NO: 76519 - DNA, 80 bp, synthetic construct; identical to SEQ ID NO: 42769
  source 1..80: mol_type = other DNA

SEQ ID NO: 76520 - DNA, 80 bp, synthetic construct; identical to SEQ ID NO: 42770
  source 1..80: mol_type = other DNA

SEQ ID NO: 76521 - DNA, 80 bp, synthetic construct; identical to SEQ ID NO: 14567
  source 1..80: mol_type = other DNA

SEQ ID NO: 76522 - DNA, 80 bp, synthetic construct; identical to SEQ ID NO: 42772
  source 1..80: mol_type = other DNA

SEQ ID NO: 76523 - DNA, 80 bp, synthetic construct; identical to SEQ ID NO: 42773
  source 1..80: mol_type = other DNA

SEQ ID NO: 76524 - DNA, 80 bp, synthetic construct; identical to SEQ ID NO: 42774
  source 1..80: mol_type = other DNA

SEQ ID NO: 76525 - DNA, 80 bp, synthetic construct; identical to SEQ ID NO: 14568
  source 1..80: mol_type = other DNA

SEQ ID NO: 76526 - DNA, 80 bp, synthetic construct; identical to SEQ ID NO: 42776
  source 1..80: mol_type = other DNA

SEQ ID NO: 76527 - DNA, 80 bp, synthetic construct; identical to SEQ ID NO: 42777
  source 1..80: mol_type = other DNA

SEQ ID NO: 76528 - DNA, 80 bp, synthetic construct; identical to SEQ ID NO: 42778
  source 1..80: mol_type = other DNA

SEQ ID NO: 76529 - DNA, 80 bp, synthetic construct; identical to SEQ ID NO: 42779
  source 1..80: mol_type = other DNA

SEQ ID NO: 76530 - DNA, 80 bp, synthetic construct; identical to SEQ ID NO: 14569
  source 1..80: mol_type = other DNA

SEQ ID NO: 76531 - DNA, 80 bp, synthetic construct; identical to SEQ ID NO: 42781
  source 1..80: mol_type = other DNA

SEQ ID NO: 76532 - DNA, 80 bp, synthetic construct; identical to SEQ ID NO: 42782
  source 1..80: mol_type = other DNA

SEQ ID NO: 76533 - DNA, 80 bp, synthetic construct; identical to SEQ ID NO: 14570
  source 1..80: mol_type = other DNA

SEQ ID NO: 76534 - DNA, 80 bp, synthetic construct; identical to SEQ ID NO: 42784
  source 1..80: mol_type = other DNA

SEQ ID NO: 76535 - DNA, 80 bp, synthetic construct; identical to SEQ ID NO: 42785
  source 1..80: mol_type = other DNA

SEQ ID NO: 76536 - DNA, 80 bp, synthetic construct; identical to SEQ ID NO: 42786
  source 1..80: mol_type = other DNA

SEQ ID NO: 76537 - DNA, 80 bp, synthetic construct; identical to SEQ ID NO: 14571
  source 1..80: mol_type = other DNA

SEQ ID NO: 76538 - DNA, 80 bp, synthetic construct; identical to SEQ ID NO: 42788
  source 1..80: mol_type = other DNA

SEQ ID NO: 76539 - DNA, 80 bp, synthetic construct; identical to SEQ ID NO: 42789
  source 1..80: mol_type = other DNA

SEQ ID NO: 76540 - DNA, 80 bp, synthetic construct; identical to SEQ ID NO: 42790
  source 1..80: mol_type = other DNA

SEQ ID NO: 76541 - DNA, 80 bp, synthetic construct; identical to SEQ ID NO: 14572
  source 1..80: mol_type = other DNA

SEQ ID NO: 76542 - DNA, 80 bp, synthetic construct; identical to SEQ ID NO: 42792
  source 1..80: mol_type = other DNA

SEQ ID NO: 76543 - DNA, 80 bp, synthetic construct; identical to SEQ ID NO: 42793
  source 1..80: mol_type = other DNA

SEQ ID NO: 76544 - DNA, 80 bp, synthetic construct; identical to SEQ ID NO: 42794
  source 1..80: mol_type = other DNA

SEQ ID NO: 76545 - DNA, 80 bp, synthetic construct; identical to SEQ ID NO: 14573
  source 1..80: mol_type = other DNA

SEQ ID NO: 76546 - DNA, 80 bp, synthetic construct; identical to SEQ ID NO: 42797
  source 1..80: mol_type = other DNA

SEQ ID NO: 76547 - DNA, 80 bp, synthetic construct; identical to SEQ ID NO: 42798
  source 1..80: mol_type = other DNA

SEQ ID NO: 76548 - DNA, 80 bp, synthetic construct; identical to SEQ ID NO: 42799
  source 1..80: mol_type = other DNA

SEQ ID NO: 76549 - DNA, 80 bp, synthetic construct; identical to SEQ ID NO: 14574
  source 1..80: mol_type = other DNA

SEQ ID NO: 76550 - DNA, 80 bp, synthetic construct; identical to SEQ ID NO: 42801
  source 1..80: mol_type = other DNA

SEQ ID NO: 76551 - DNA, 80 bp, synthetic construct; identical to SEQ ID NO: 42802
  source 1..80: mol_type = other DNA

SEQ ID NO: 76552 - DNA, 80 bp, synthetic construct; identical to SEQ ID NO: 42803
  source 1..80: mol_type = other DNA

SEQ ID NO: 76553 - DNA, 80 bp, synthetic construct; identical to SEQ ID NO: 14575
  source 1..80: mol_type = other DNA

SEQ ID NO: 76554 - DNA, 80 bp, synthetic construct; identical to SEQ ID NO: 42805
  source 1..80: mol_type = other DNA

SEQ ID NO: 76555 - DNA, 80 bp, synthetic construct; identical to SEQ ID NO: 42806
  source 1..80: mol_type = other DNA

SEQ ID NO: 76556 - DNA, 80 bp, synthetic construct; identical to SEQ ID NO: 14576
  source 1..80: mol_type = other DNA

SEQ ID NO: 76557 - DNA, 80 bp, synthetic construct; identical to SEQ ID NO: 42808
  source 1..80: mol_type = other DNA

SEQ ID NO: 76558 - DNA, 80 bp, synthetic construct; identical to SEQ ID NO: 42809
  source 1..80: mol_type = other DNA

SEQ ID NO: 76559 - DNA, 80 bp, synthetic construct; identical to SEQ ID NO: 42810
  source 1..80: mol_type = other DNA

SEQ ID NO: 76560 - DNA, 80 bp, synthetic construct; identical to SEQ ID NO: 14577
  source 1..80: mol_type = other DNA

SEQ ID NO: 76561 - DNA, 80 bp, synthetic construct; identical to SEQ ID NO: 42812
  source 1..80: mol_type = other DNA

SEQ ID NO: 76562 - DNA, 80 bp, synthetic construct; identical to SEQ ID NO: 42813
  source 1..80: mol_type = other DNA

SEQ ID NO: 76563 - DNA, 80 bp, synthetic construct; identical to SEQ ID NO: 42814
  source 1..80: mol_type = other DNA

SEQ ID NO: 76564 - DNA, 80 bp, synthetic construct; identical to SEQ ID NO: 42816
  source 1..80: mol_type = other DNA

SEQ ID NO: 76565 - DNA, 80 bp, synthetic construct; identical to SEQ ID NO: 42818
  source 1..80: mol_type = other DNA

SEQ ID NO: 76566 - DNA, 80 bp, synthetic construct; identical to SEQ ID NO: 14579
  source 1..80: mol_type = other DNA

SEQ ID NO: 76567 - DNA, 80 bp, synthetic construct; identical to SEQ ID NO: 42822
  source 1..80: mol_type = other DNA

SEQ ID NO: 76568 - DNA, 80 bp, synthetic construct; identical to SEQ ID NO: 14580
  source 1..80: mol_type = other DNA

SEQ ID NO: 76569 - DNA, 80 bp, synthetic construct; identical to SEQ ID NO: 42826
  source 1..80: mol_type = other DNA

SEQ ID NO: 76570 - DNA, 80 bp, synthetic construct; identical to SEQ ID NO: 14581
  source 1..80: mol_type = other DNA

SEQ ID NO: 76571 - DNA, 80 bp, synthetic construct; identical to SEQ ID NO: 42830
  source 1..80: mol_type = other DNA

SEQ ID NO: 76572 - DNA, 80 bp, synthetic construct; identical to SEQ ID NO: 14582
  source 1..80: mol_type = other DNA

SEQ ID NO: 76573 - DNA, 80 bp, synthetic construct; identical to SEQ ID NO: 42834
  source 1..80: mol_type = other DNA

SEQ ID NO: 76574 - DNA, 80 bp, synthetic construct; identical to SEQ ID NO: 14583
  source 1..80: mol_type = other DNA

SEQ ID NO: 76575 - DNA, 80 bp, synthetic construct; identical to SEQ ID NO: 42837
  source 1..80: mol_type = other DNA

SEQ ID NO: 76576 - DNA, 80 bp, synthetic construct; identical to SEQ ID NO: 42839
  source 1..80: mol_type = other DNA

SEQ ID NO: 76577 - DNA, 80 bp, synthetic construct; identical to SEQ ID NO: 14584
  source 1..80: mol_type = other DNA

SEQ ID NO: 76578 - DNA, 80 bp, synthetic construct; identical to SEQ ID NO: 42841
  source 1..80: mol_type = other DNA

SEQ ID NO: 76579 - DNA, 80 bp, synthetic construct; identical to SEQ ID NO: 14585
  source 1..80: mol_type = other DNA

SEQ ID NO: 76580 - DNA, 80 bp, synthetic construct; identical to SEQ ID NO: 42844
  source 1..80: mol_type = other DNA

SEQ ID NO: 76581 - DNA, 80 bp, synthetic construct; identical to SEQ ID NO: 42845
  source 1..80: mol_type = other DNA

SEQ ID NO: 76582 - DNA, 80 bp, synthetic construct; identical to SEQ ID NO: 42846
  source 1..80: mol_type = other DNA

SEQ ID NO: 76583 - DNA, 80 bp, synthetic construct; identical to SEQ ID NO: 42847
  source 1..80: mol_type = other DNA

SEQ ID NO: 76584 - DNA, 80 bp, synthetic construct; identical to SEQ ID NO: 14586
  source 1..80: mol_type = other DNA

SEQ ID NO: 76585 - DNA, 80 bp, synthetic construct; identical to SEQ ID NO: 42849
  source 1..80: mol_type = other DNA

SEQ ID NO: 76586 - DNA, 80 bp, synthetic construct; identical to SEQ ID NO: 42850
  source 1..80: mol_type = other DNA

SEQ ID NO: 76587 - DNA, 80 bp, synthetic construct; identical to SEQ ID NO: 42851
  source 1..80: mol_type = other DNA

SEQ ID NO: 76588 - DNA, 80 bp, synthetic construct; identical to SEQ ID NO: 14587
  source 1..80: mol_type = other DNA

SEQ ID NO: 76589 - DNA, 80 bp, synthetic construct; identical to SEQ ID NO: 42853
  source 1..80: mol_type = other DNA

SEQ ID NO: 76590 - DNA, 80 bp, synthetic construct; identical to SEQ ID NO: 42854
  source 1..80: mol_type = other DNA

SEQ ID NO: 76591 - DNA, 80 bp, synthetic construct; identical to SEQ ID NO: 14588
  source 1..80: mol_type = other DNA

SEQ ID NO: 76592 - DNA, 80 bp, synthetic construct; identical to SEQ ID NO: 42856
  source 1..80: mol_type = other DNA

SEQ ID NO: 76593 - DNA, 80 bp, synthetic construct; identical to SEQ ID NO: 42857
  source 1..80: mol_type = other DNA

SEQ ID NO: 76594 - DNA, 80 bp, synthetic construct; identical to SEQ ID NO: 42858
  source 1..80: mol_type = other DNA

SEQ ID NO: 76595 - DNA, 80 bp, synthetic construct; identical to SEQ ID NO: 14589
  source 1..80: mol_type = other DNA

SEQ ID NO: 76596 - DNA, 80 bp, synthetic construct; identical to SEQ ID NO: 42861
  source 1..80: mol_type = other DNA

SEQ ID NO: 76597 - DNA, 80 bp, synthetic construct; identical to SEQ ID NO: 42862
  source 1..80: mol_type = other DNA

SEQ ID NO: 76598 - DNA, 80 bp, synthetic construct; identical to SEQ ID NO: 14590
  source 1..80: mol_type = other DNA

SEQ ID NO: 76599 - DNA, 80 bp, synthetic construct; identical to SEQ ID NO: 42864
  source 1..80: mol_type = other DNA

SEQ ID NO: 76600 - DNA, 80 bp, synthetic construct; identical to SEQ ID NO: 42866
  source 1..80: mol_type = other DNA

SEQ ID NO: 76601 - DNA, 80 bp, synthetic construct; identical to SEQ ID NO: 14591
  source 1..80: mol_type = other DNA

SEQ ID NO: 76602 - DNA, 80 bp, synthetic construct; identical to SEQ ID NO: 42869
  source 1..80: mol_type = other DNA

SEQ ID NO: 76603 - DNA, 80 bp, synthetic construct; identical to SEQ ID NO: 42870
  source 1..80: mol_type = other DNA

SEQ ID NO: 76604 - DNA, 80 bp, synthetic construct; identical to SEQ ID NO: 14592
  source 1..80: mol_type = other DNA

SEQ ID NO: 76605 - DNA, 80 bp, synthetic construct; identical to SEQ ID NO: 42873
  source 1..80: mol_type = other DNA

SEQ ID NO: 76606 - DNA, 80 bp, synthetic construct; identical to SEQ ID NO: 42874
  source 1..80: mol_type = other DNA

SEQ ID NO: 76607 - DNA, 80 bp, synthetic construct; identical to SEQ ID NO: 42875
  source 1..80: mol_type = other DNA

SEQ ID NO: 76608 - DNA, 80 bp, synthetic construct; identical to SEQ ID NO: 14593
  source 1..80: mol_type = other DNA

SEQ ID NO: 76609 - DNA, 80 bp, synthetic construct; identical to SEQ ID NO: 42877
  source 1..80: mol_type = other DNA

SEQ ID NO: 76610 - DNA, 80 bp, synthetic construct; identical to SEQ ID NO: 42878
  source 1..80: mol_type = other DNA

SEQ ID NO: 76611 - DNA, 80 bp, synthetic construct; identical to SEQ ID NO: 14594
  source 1..80: mol_type = other DNA

SEQ ID NO: 76612 - DNA, 80 bp, synthetic construct; identical to SEQ ID NO: 42881
  source 1..80: mol_type = other DNA

SEQ ID NO: 76613 - DNA, 80 bp, synthetic construct; identical to SEQ ID NO: 42882
  source 1..80: mol_type = other DNA

SEQ ID NO: 76614 - DNA, 80 bp, synthetic construct; identical to SEQ ID NO: 14595
  source 1..80: mol_type = other DNA

SEQ ID NO: 76615 - DNA, 80 bp, synthetic construct; identical to SEQ ID NO: 42884
  source 1..80: mol_type = other DNA

SEQ ID NO: 76616 - DNA, 80 bp, synthetic construct; identical to SEQ ID NO: 42885
  source 1..80: mol_type = other DNA

SEQ ID NO: 76617 - DNA, 80 bp, synthetic construct; identical to SEQ ID NO: 42886
  source 1..80: mol_type = other DNA

SEQ ID NO: 76618 - DNA, 80 bp, synthetic construct; identical to SEQ ID NO: 14596
  source 1..80: mol_type = other DNA

SEQ ID NO: 76619 - DNA, 80 bp, synthetic construct; identical to SEQ ID NO: 42888
  source 1..80: mol_type = other DNA

SEQ ID NO: 76620 - DNA, 80 bp, synthetic construct; identical to SEQ ID NO: 42889
  source 1..80: mol_type = other DNA

SEQ ID NO: 76621 - DNA, 80 bp, synthetic construct; identical to SEQ ID NO: 42890
  source 1..80: mol_type = other DNA

SEQ ID NO: 76622 - DNA, 80 bp, synthetic construct; identical to SEQ ID NO: 14597
  source 1..80: mol_type = other DNA

SEQ ID NO: 76623 - DNA, 80 bp, synthetic construct; identical to SEQ ID NO: 42892
  source 1..80: mol_type = other DNA

SEQ ID NO: 76624 - DNA, 80 bp, synthetic construct; identical to SEQ ID NO: 42893
  source 1..80: mol_type = other DNA

SEQ ID NO: 76625 - DNA, 80 bp, synthetic construct; identical to SEQ ID NO: 42894
  source 1..80: mol_type = other DNA

SEQ ID NO: 76626 - DNA, 80 bp, synthetic construct; identical to SEQ ID NO: 42895
  source 1..80: mol_type = other DNA

SEQ ID NO: 76627 - DNA, 80 bp, synthetic construct; identical to SEQ ID NO: 14598
  source 1..80: mol_type = other DNA

SEQ ID NO: 76628 - DNA, 80 bp, synthetic construct; identical to SEQ ID NO: 42897
  source 1..80: mol_type = other DNA

SEQ ID NO: 76629 - DNA, 80 bp, synthetic construct; identical to SEQ ID NO: 42898
  source 1..80: mol_type = other DNA

SEQ ID NO: 76630 - DNA, 80 bp, synthetic construct; identical to SEQ ID NO: 14599
  source 1..80: mol_type = other DNA

SEQ ID NO: 76631 - DNA, 80 bp, synthetic construct; identical to SEQ ID NO: 42901
  source 1..80: mol_type = other DNA

SEQ ID NO: 76632 - DNA, 80 bp, synthetic construct; identical to SEQ ID NO: 42902
  source 1..80: mol_type = other DNA

SEQ ID NO: 76633 - DNA, 80 bp, synthetic construct; identical to SEQ ID NO: 42903
  source 1..80: mol_type = other DNA

SEQ ID NO: 76634 - DNA, 80 bp, synthetic construct; identical to SEQ ID NO: 14600
  source 1..80: mol_type = other DNA

SEQ ID NO: 76635 - DNA, 80 bp, synthetic construct; identical to SEQ ID NO: 42905
  source 1..80: mol_type = other DNA

SEQ ID NO: 76636 - DNA, 80 bp, synthetic construct; identical to SEQ ID NO: 42906
  source 1..80: mol_type = other DNA

SEQ ID NO: 76637 - DNA, 80 bp, synthetic construct; identical to SEQ ID NO: 14601
  source 1..80: mol_type = other DNA

SEQ ID NO: 76638 - DNA, 80 bp, synthetic construct; identical to SEQ ID NO: 42908
  source 1..80: mol_type = other DNA

SEQ ID NO: 76639 - DNA, 80 bp, synthetic construct; identical to SEQ ID NO: 42909
  source 1..80: mol_type = other DNA

SEQ ID NO: 76640 - DNA, 80 bp, synthetic construct; identical to SEQ ID NO: 42910
  source 1..80: mol_type = other DNA

SEQ ID NO: 76641 - DNA, 80 bp, synthetic construct; identical to SEQ ID NO: 14602
  source 1..80: mol_type = other DNA

SEQ ID NO: 76642 - DNA, 80 bp, synthetic construct; identical to SEQ ID NO: 42912
  source 1..80: mol_type = other DNA

SEQ ID NO: 76643 - DNA, 80 bp, synthetic construct; identical to SEQ ID NO: 42913
  source 1..80: mol_type = other DNA

SEQ ID NO: 76644 - DNA, 80 bp, synthetic construct; identical to SEQ ID NO: 42914
  source 1..80: mol_type = other DNA

SEQ ID NO: 76645 - DNA, 80 bp, synthetic construct; identical to SEQ ID NO: 42915
  source 1..80: mol_type = other DNA

SEQ ID NO: 76646 - DNA, 80 bp, synthetic construct; identical to SEQ ID NO: 14603
  source 1..80: mol_type = other DNA

SEQ ID NO: 76647 - DNA, 80 bp, synthetic construct; identical to SEQ ID NO: 42917
  source 1..80: mol_type = other DNA

SEQ ID NO: 76648 - DNA, 80 bp, synthetic construct; identical to SEQ ID NO: 42918
  source 1..80: mol_type = other DNA

SEQ ID NO: 76649 - DNA, 80 bp, synthetic construct; identical to SEQ ID NO: 14604
  source 1..80: mol_type = other DNA

SEQ ID NO: 76650 - DNA, 80 bp, synthetic construct; identical to SEQ ID NO: 42920
  source 1..80: mol_type = other DNA

SEQ ID NO: 76651 - DNA, 80 bp, synthetic construct; identical to SEQ ID NO: 42921
  source 1..80: mol_type = other DNA

SEQ ID NO: 76652 - DNA, 80 bp, synthetic construct; identical to SEQ ID NO: 42922
  source 1..80: mol_type = other DNA

SEQ ID NO: 76653 - DNA, 80 bp, synthetic construct; identical to SEQ ID NO: 14605
  source 1..80: mol_type = other DNA

SEQ ID NO: 76654 - DNA, 80 bp, synthetic construct; identical to SEQ ID NO: 42924
  source 1..80: mol_type = other DNA

SEQ ID NO: 76655 - DNA, 80 bp, synthetic construct; identical to SEQ ID NO: 42925
  source 1..80: mol_type = other DNA

SEQ ID NO: 76656 - DNA, 80 bp, synthetic construct; identical to SEQ ID NO: 42926
  source 1..80: mol_type = other DNA

SEQ ID NO: 76657 - DNA, 80 bp, synthetic construct; identical to SEQ ID NO: 14606
  source 1..80: mol_type = other DNA

SEQ ID NO: 76658 - DNA, 80 bp, synthetic construct; identical to SEQ ID NO: 42928
  source 1..80: mol_type = other DNA

SEQ ID NO: 76659 - DNA, 80 bp, synthetic construct; identical to SEQ ID NO: 42929
  source 1..80: mol_type = other DNA

SEQ ID NO: 76660 - DNA, 80 bp, synthetic construct; identical to SEQ ID NO: 42930
  source 1..80: mol_type = other DNA

SEQ ID NO: 76661 - DNA, 80 bp, synthetic construct; identical to SEQ ID NO: 42931
  source 1..80: mol_type = other DNA

SEQ ID NO: 76662 - DNA, 80 bp, synthetic construct; identical to SEQ ID NO: 14607
  source 1..80: mol_type = other DNA

SEQ ID NO: 76663 - DNA, 80 bp, synthetic construct; identical to SEQ ID NO: 42933
  source 1..80: mol_type = other DNA

SEQ ID NO: 76664 - DNA, 80 bp, synthetic construct; identical to SEQ ID NO: 42934
  source 1..80: mol_type = other DNA

SEQ ID NO: 76665 - DNA, 80 bp, synthetic construct; identical to SEQ ID NO: 42935
  source 1..80: mol_type = other DNA

SEQ ID NO: 76666 - DNA, 80 bp, synthetic construct; identical to SEQ ID NO: 14608
  source 1..80: mol_type = other DNA

SEQ ID NO: 76667 - DNA, 80 bp, synthetic construct; identical to SEQ ID NO: 42937
  source 1..80: mol_type = other DNA

SEQ ID NO: 76668 - DNA, 80 bp, synthetic construct; identical to SEQ ID NO: 42938
  source 1..80: mol_type = other DNA

SEQ ID NO: 76669 - DNA, 80 bp, synthetic construct; identical to SEQ ID NO: 42939
  source 1..80: mol_type = other DNA

SEQ ID NO: 76670 - DNA, 80 bp, synthetic construct; identical to SEQ ID NO: 14609
  source 1..80: mol_type = other DNA

SEQ ID NO: 76671 - DNA, 80 bp, synthetic construct; identical to SEQ ID NO: 42941
  source 1..80: mol_type = other DNA

SEQ ID NO: 76672 - DNA, 80 bp, synthetic construct; identical to SEQ ID NO: 42942
  source 1..80: mol_type = other DNA

SEQ ID NO: 76673 - DNA, 80 bp, synthetic construct; identical to SEQ ID NO: 14610
  source 1..80: mol_type = other DNA

SEQ ID NO: 76674 - DNA, 80 bp, synthetic construct; identical to SEQ ID NO: 42945
  source 1..80: mol_type = other DNA

SEQ ID NO: 76675 - DNA, 80 bp, synthetic construct; identical to SEQ ID NO: 42946
  source 1..80: mol_type = other DNA

SEQ ID NO: 76676 - DNA, 80 bp, synthetic construct; identical to SEQ ID NO: 42947
  source 1..80: mol_type = other DNA

SEQ ID NO: 76677 - DNA, 80 bp, synthetic construct; identical to SEQ ID NO: 14611
  source 1..80: mol_type = other DNA

SEQ ID NO: 76678 - DNA, 80 bp, synthetic construct; identical to SEQ ID NO: 42949
  source 1..80: mol_type = other DNA

SEQ ID NO: 76679 - DNA, 80 bp, synthetic construct; identical to SEQ ID NO: 42950
  source 1..80: mol_type = other DNA

SEQ ID NO: 76680 - DNA, 80 bp, synthetic construct; identical to SEQ ID NO: 42951
  source 1..80: mol_type = other DNA

SEQ ID NO: 76681 - DNA, 80 bp, synthetic construct; identical to SEQ ID NO: 14612
  source 1..80: mol_type = other DNA

SEQ ID NO: 76682 - DNA, 80 bp, synthetic construct; identical to SEQ ID NO: 42953
  source 1..80: mol_type = other DNA

SEQ ID NO: 76683 - DNA, 80 bp, synthetic construct; identical to SEQ ID NO: 42954
  source 1..80: mol_type = other DNA

SEQ ID NO: 76684 - DNA, 80 bp, synthetic construct; identical to SEQ ID NO: 42955
  source 1..80: mol_type = other DNA

SEQ ID NO: 76685 - DNA, 80 bp, synthetic construct; identical to SEQ ID NO: 14613
  source 1..80: mol_type = other DNA

SEQ ID NO: 76686 - DNA, 80 bp, synthetic construct; identical to SEQ ID NO: 42957
  source 1..80: mol_type = other DNA

SEQ ID NO: 76687 - DNA, 80 bp, synthetic construct; identical to SEQ ID NO: 42958
  source 1..80: mol_type = other DNA

SEQ ID NO: 76688 - DNA, 80 bp, synthetic construct; identical to SEQ ID NO: 14614
  source 1..80: mol_type = other DNA

SEQ ID NO: 76689 - DNA, 80 bp, synthetic construct; identical to SEQ ID NO: 42960
  source 1..80: mol_type = other DNA

SEQ ID NO: 76690 - DNA, 80 bp, synthetic construct; identical to SEQ ID NO: 42961
  source 1..80: mol_type = other DNA

SEQ ID NO: 76691 - DNA, 80 bp, synthetic construct; identical to SEQ ID NO: 42962
  source 1..80: mol_type = other DNA

SEQ ID NO: 76692 - DNA, 80 bp, synthetic construct; identical to SEQ ID NO: 14615
  source 1..80: mol_type = other DNA

SEQ ID NO: 76693 - DNA, 80 bp, synthetic construct; identical to SEQ ID NO: 42964
  source 1..80: mol_type = other DNA

SEQ ID NO: 76694 - DNA, 80 bp, synthetic construct; identical to SEQ ID NO: 42965
  source 1..80: mol_type = other DNA

SEQ ID NO: 76695 - DNA, 80 bp, synthetic construct; identical to SEQ ID NO: 42966
  source 1..80: mol_type = other DNA

SEQ ID NO: 76696 - DNA, 80 bp, synthetic construct; identical to SEQ ID NO: 42967
  source 1..80: mol_type = other DNA

SEQ ID NO: 76697 - DNA, 80 bp, synthetic construct; identical to SEQ ID NO: 14616
  source 1..80: mol_type = other DNA

SEQ ID NO: 76698 - DNA, 80 bp, synthetic construct; identical to SEQ ID NO: 42969
  source 1..80: mol_type = other DNA

SEQ ID NO: 76699 - DNA, 80 bp, synthetic construct; identical to SEQ ID NO: 42970
  source 1..80: mol_type = other DNA

SEQ ID NO: 76700 - DNA, 80 bp, synthetic construct; identical to SEQ ID NO: 42971
  source 1..80: mol_type = other DNA

SEQ ID NO: 76701 - DNA, 80 bp, synthetic construct; identical to SEQ ID NO: 14617
  source 1..80: mol_type = other DNA

SEQ ID NO: 76702 - DNA, 80 bp, synthetic construct; identical to SEQ ID NO: 42973
  source 1..80: mol_type = other DNA

SEQ ID NO: 76703 - DNA, 80 bp, synthetic construct; identical to SEQ ID NO: 42974
  source 1..80: mol_type = other DNA

SEQ ID NO: 76704 - DNA, 80 bp, synthetic construct; identical to SEQ ID NO: 14618
  source 1..80: mol_type = other DNA

SEQ ID NO: 76705 - DNA, 80 bp, synthetic construct; identical to SEQ ID NO: 42976
  source 1..80: mol_type = other DNA

SEQ ID NO: 76706 - DNA, 80 bp, synthetic construct; identical to SEQ ID NO: 42978
  source 1..80: mol_type = other DNA

SEQ ID NO: 76707 - DNA, 80 bp, synthetic construct; identical to SEQ ID NO: 42979
  source 1..80: mol_type = other DNA

SEQ ID NO: 76708 - DNA, 80 bp, synthetic construct; identical to SEQ ID NO: 14619
  source 1..80: mol_type = other DNA

SEQ ID NO: 76709 - DNA, 80 bp, synthetic construct; identical to SEQ ID NO: 42981
  source 1..80: mol_type = other DNA

SEQ ID NO: 76710 - DNA, 80 bp, synthetic construct; identical to SEQ ID NO: 42982
  source 1..80: mol_type = other DNA

SEQ ID NO: 76711 - DNA, 80 bp, synthetic construct; identical to SEQ ID NO: 42983
  source 1..80: mol_type = other DNA

SEQ ID NO: 76712 - DNA, 80 bp, synthetic construct; identical to SEQ ID NO: 14620
  source 1..80: mol_type = other DNA

SEQ ID NO: 76713 - DNA, 80 bp, synthetic construct; identical to SEQ ID NO: 42985
  source 1..80: mol_type = other DNA

SEQ ID NO: 76714 - DNA, 80 bp, synthetic construct; identical to SEQ ID NO: 42986
  source 1..80: mol_type = other DNA

SEQ ID NO: 76715 - DNA, 80 bp, synthetic construct; identical to SEQ ID NO: 14621
  source 1..80: mol_type = other DNA

SEQ ID NO: 76716 - DNA, 80 bp, synthetic construct; identical to SEQ ID NO: 42988
  source 1..80: mol_type = other DNA

SEQ ID NO: 76717 - DNA, 80 bp, synthetic construct; identical to SEQ ID NO: 42989
  source 1..80: mol_type = other DNA

SEQ ID NO: 76718 - DNA, 80 bp, synthetic construct; identical to SEQ ID NO: 42991
  source 1..80: mol_type = other DNA

SEQ ID NO: 76719 - DNA, 80 bp, synthetic construct; identical to SEQ ID NO: 14622
  source 1..80: mol_type = other DNA

SEQ ID NO: 76720 - DNA, 80 bp, synthetic construct; identical to SEQ ID NO: 42993
  source 1..80: mol_type = other DNA

SEQ ID NO: 76721 - DNA, 80 bp, synthetic construct; identical to SEQ ID NO: 42994
  source 1..80: mol_type = other DNA

SEQ ID NO: 76722 - DNA, 80 bp, synthetic construct; identical to SEQ ID NO: 42995
  source 1..80: mol_type = other DNA

SEQ ID NO: 76723 - DNA, 80 bp, synthetic construct; identical to SEQ ID NO: 14623
  source 1..80: mol_type = other DNA

SEQ ID NO: 76724 - DNA, 80 bp, synthetic construct; identical to SEQ ID NO: 42997
  source 1..80: mol_type = other DNA

SEQ ID NO: 76725 - DNA, 80 bp, synthetic construct; identical to SEQ ID NO: 42998
  source 1..80: mol_type = other DNA

SEQ ID NO: 76726 - DNA, 80 bp, synthetic construct; identical to SEQ ID NO: 14624
  source 1..80: mol_type = other DNA

SEQ ID NO: 76727 - DNA, 80 bp, synthetic construct; identical to SEQ ID NO: 43000
  source 1..80: mol_type = other DNA

SEQ ID NO: 76728 - DNA, 80 bp, synthetic construct; identical to SEQ ID NO: 43001
  source 1..80: mol_type = other DNA

SEQ ID NO: 76729 - DNA, 80 bp, synthetic construct; identical to SEQ ID NO: 43002
  source 1..80: mol_type = other DNA

SEQ ID NO: 76730 - DNA, 80 bp, synthetic construct; identical to SEQ ID NO: 14625
  source 1..80: mol_type = other DNA

SEQ ID NO: 76731 - DNA, 80 bp, synthetic construct; identical to SEQ ID NO: 43004
  source 1..80: mol_type = other DNA

SEQ ID NO: 76732 - DNA, 80 bp, synthetic construct; identical to SEQ ID NO: 43005
  source 1..80: mol_type = other DNA

SEQ ID NO: 76733 - DNA, 80 bp, synthetic construct; identical to SEQ ID NO: 43006
  source 1..80: mol_type = other DNA

SEQ ID NO: 76734 - DNA, 80 bp, synthetic construct; identical to SEQ ID NO: 14626
  source 1..80: mol_type = other DNA

SEQ ID NO: 76735 - DNA, 80 bp, synthetic construct; identical to SEQ ID NO: 43008
  source 1..80: mol_type = other DNA

SEQ ID NO: 76736 - DNA, 80 bp, synthetic construct; identical to SEQ ID NO: 43009
  source 1..80: mol_type = other DNA

SEQ ID NO: 76737 - DNA, 80 bp, synthetic construct; identical to SEQ ID NO: 43010
  source 1..80: mol_type = other DNA

SEQ ID NO: 76738 - DNA, 80 bp, synthetic construct; identical to SEQ ID NO: 43011
  source 1..80: mol_type = other DNA

SEQ ID NO: 76739 - DNA, 80 bp, synthetic construct; identical to SEQ ID NO: 14627
  source 1..80: mol_type = other DNA

SEQ ID NO: 76740 - DNA, 80 bp, synthetic construct; identical to SEQ ID NO: 43013
  source 1..80: mol_type = other DNA

SEQ ID NO: 76741 - DNA, 80 bp, synthetic construct; identical to SEQ ID NO: 43014
  source 1..80: mol_type = other DNA

SEQ ID NO: 76742 - DNA, 80 bp, synthetic construct; identical to SEQ ID NO: 43015
  source 1..80: mol_type = other DNA

SEQ ID NO: 76743 - DNA, 80 bp, synthetic construct; identical to SEQ ID NO: 14628
  source 1..80: mol_type = other DNA

SEQ ID NO: 76744 - DNA, 80 bp, synthetic construct; identical to SEQ ID NO: 43017
  source 1..80: mol_type = other DNA

SEQ ID NO: 76745 - DNA, 80 bp, synthetic construct; identical to SEQ ID NO: 43018
  source 1..80: mol_type = other DNA

SEQ ID NO: 76746 - DNA, 80 bp, synthetic construct; identical to SEQ ID NO: 43019
  source 1..80: mol_type = other DNA

SEQ ID NO: 76747 - DNA, 80 bp, synthetic construct; identical to SEQ ID NO: 14629
  source 1..80: mol_type = other DNA

SEQ ID NO: 76748 - DNA, 80 bp, synthetic construct; identical to SEQ ID NO: 43021
  source 1..80: mol_type = other DNA

SEQ ID NO: 76749 - DNA, 80 bp, synthetic construct; identical to SEQ ID NO: 43022
  source 1..80: mol_type = other DNA

SEQ ID NO: 76750 - DNA, 80 bp, synthetic construct; identical to SEQ ID NO: 14630
  source 1..80: mol_type = other DNA

SEQ ID NO: 76751 - DNA, 80 bp, synthetic construct; identical to SEQ ID NO: 43025
  source 1..80: mol_type = other DNA

SEQ ID NO: 76752 - DNA, 80 bp, synthetic construct; identical to SEQ ID NO: 43026
  source 1..80: mol_type = other DNA

SEQ ID NO: 76753 - DNA, 80 bp, synthetic construct; identical to SEQ ID NO: 43027
  source 1..80: mol_type = other DNA

SEQ ID NO: 76754 - DNA, 80 bp, synthetic construct; identical to SEQ ID NO: 14631
  source 1..80: mol_type = other DNA

SEQ ID NO: 76755 - DNA, 80 bp, synthetic construct; identical to SEQ ID NO: 43029
  source 1..80: mol_type = other DNA

SEQ ID NO: 76756 - DNA, 80 bp, synthetic construct; identical to SEQ ID NO: 43030
  source 1..80: mol_type = other DNA

SEQ ID NO: 76757 - DNA, 80 bp, synthetic construct; identical to SEQ ID NO: 14632
  source 1..80: mol_type = other DNA

SEQ ID NO: 76758 - DNA, 80 bp, synthetic construct; identical to SEQ ID NO: 43032
  source 1..80: mol_type = other DNA

SEQ ID NO: 76759 - DNA, 80 bp, synthetic construct; identical to SEQ ID NO: 43033
  source 1..80: mol_type = other DNA

SEQ ID NO: 76760 - DNA, 80 bp, synthetic construct; identical to SEQ ID NO: 43034
  source 1..80: mol_type = other DNA

SEQ ID NO: 76761 - DNA, 80 bp, synthetic construct; identical to SEQ ID NO: 14633
  source 1..80: mol_type = other DNA

SEQ ID NO: 76762 - DNA, 80 bp, synthetic construct; identical to SEQ ID NO: 43036
  source 1..80: mol_type = other DNA

SEQ ID NO: 76763 - DNA, 80 bp, synthetic construct; identical to SEQ ID NO: 43037
  source 1..80: mol_type = other DNA

SEQ ID NO: 76764 - DNA, 80 bp, synthetic construct; identical to SEQ ID NO: 43038
  source 1..80: mol_type = other DNA

SEQ ID NO: 76765 - DNA, 80 bp, synthetic construct; identical to SEQ ID NO: 43039
  source 1..80: mol_type = other DNA

SEQ ID NO: 76766 - DNA, 80 bp, synthetic construct; identical to SEQ ID NO: 14634
  source 1..80: mol_type = other DNA

SEQ ID NO: 76767 - DNA, 80 bp, synthetic construct; identical to SEQ ID NO: 43041
  source 1..80: mol_type = other DNA

SEQ ID NO: 76768 - DNA, 80 bp, synthetic construct; identical to SEQ ID NO: 43042
  source 1..80: mol_type = other DNA

SEQ ID NO: 76769 - DNA, 80 bp, synthetic construct; identical to SEQ ID NO: 14635
  source 1..80: mol_type = other DNA

SEQ ID NO: 76770 - DNA, 80 bp, synthetic construct; identical to SEQ ID NO: 43044
  source 1..80: mol_type = other DNA

SEQ ID NO: 76771 - DNA, 80 bp, synthetic construct; identical to SEQ ID NO: 43045
  source 1..80: mol_type = other DNA

SEQ ID NO: 76772 - DNA, 80 bp, synthetic construct; identical to SEQ ID NO: 43046
  source 1..80: mol_type = other DNA

SEQ ID NO: 76773 - DNA, 80 bp, synthetic construct; identical to SEQ ID NO: 14636
  source 1..80: mol_type = other DNA

SEQ ID NO: 76774 - DNA, 80 bp, synthetic construct; identical to SEQ ID NO: 43048
  source 1..80: mol_type = other DNA

SEQ ID NO: 76775 - DNA, 80 bp, synthetic construct; identical to SEQ ID NO: 43049
  source 1..80: mol_type = other DNA

SEQ ID NO: 76776 - DNA, 80 bp, synthetic construct; identical to SEQ ID NO: 43050
  source 1..80: mol_type = other DNA

SEQ ID NO: 76777 - DNA, 80 bp, synthetic construct; identical to SEQ ID NO: 14637
  source 1..80: mol_type = other DNA

SEQ ID NO: 76778 - DNA, 80 bp, synthetic construct; identical to SEQ ID NO: 43052
  source 1..80: mol_type = other DNA

SEQ ID NO: 76779 - DNA, 80 bp, synthetic construct; identical to SEQ ID NO: 43053
  source 1..80: mol_type = other DNA

SEQ ID NO: 76780 - DNA, 80 bp, synthetic construct; identical to SEQ ID NO: 43054
  source 1..80: mol_type = other DNA

SEQ ID NO: 76781 - DNA, 80 bp, synthetic construct; identical to SEQ ID NO: 14638
  source 1..80: mol_type = other DNA

SEQ ID NO: 76782 - DNA, 80 bp, synthetic construct; identical to SEQ ID NO: 43056
  source 1..80: mol_type = other DNA

SEQ ID NO: 76783 - DNA, 80 bp, synthetic construct; identical to SEQ ID NO: 43057
  source 1..80: mol_type = other DNA

SEQ ID NO: 76784 - DNA, 80 bp, synthetic construct; identical to SEQ ID NO: 43058
  source 1..80: mol_type = other DNA

SEQ ID NO: 76785 - DNA, 80 bp, synthetic construct; identical to SEQ ID NO: 43059
  source 1..80: mol_type = other DNA

SEQ ID NO: 76786 - DNA, 80 bp, synthetic construct; identical to SEQ ID NO: 14639
  source 1..80: mol_type = other DNA

SEQ ID NO: 76787 - DNA, 80 bp, synthetic construct; identical to SEQ ID NO: 43061
  source 1..80: mol_type = other DNA

SEQ ID NO: 76788 - DNA, 80 bp, synthetic construct; identical to SEQ ID NO: 43062
  source 1..80: mol_type = other DNA

SEQ ID NO: 76789 - DNA, 80 bp, synthetic construct; identical to SEQ ID NO: 43063
  source 1..80: mol_type = other DNA

SEQ ID NO: 76790 - DNA, 80 bp, synthetic construct; identical to SEQ ID NO: 14640
  source 1..80: mol_type = other DNA

SEQ ID NO: 76791 - DNA, 80 bp, synthetic construct; identical to SEQ ID NO: 43065
  source 1..80: mol_type = other DNA

SEQ ID NO: 76792 - DNA, 80 bp, synthetic construct; identical to SEQ ID NO: 43066
  source 1..80: mol_type = other DNA

SEQ ID NO: 76793 - DNA, 80 bp, synthetic construct; identical to SEQ ID NO: 43067
  source 1..80: mol_type = other DNA

SEQ ID NO: 76794 - DNA, 80 bp, synthetic construct; identical to SEQ ID NO: 14641
  source 1..80: mol_type = other DNA

SEQ ID NO: 76795 - DNA, 80 bp, synthetic construct; identical to SEQ ID NO: 43069
  source 1..80: mol_type = other DNA

SEQ ID NO: 76796 - DNA, 80 bp, synthetic construct; identical to SEQ ID NO: 43070
  source 1..80: mol_type = other DNA

SEQ ID NO: 76797 - DNA, 80 bp, synthetic construct; identical to SEQ ID NO: 43071
  source 1..80: mol_type = other DNA

SEQ ID NO: 76798 - DNA, 80 bp, synthetic construct; identical to SEQ ID NO: 14642
  source 1..80: mol_type = other DNA

SEQ ID NO: 76799 - DNA, 80 bp, synthetic construct; identical to SEQ ID NO: 43074
  source 1..80: mol_type = other DNA

SEQ ID NO: 76800 - DNA, 80 bp, synthetic construct; identical to SEQ ID NO: 43075
  source 1..80: mol_type = other DNA

SEQ ID NO: 76801 - DNA, 80 bp, synthetic construct; identical to SEQ ID NO: 14643
  source 1..80: mol_type = other DNA

SEQ ID NO: 76802 - DNA, 80 bp, synthetic construct; identical to SEQ ID NO: 43077
  source 1..80: mol_type = other DNA

SEQ ID NO: 76803 - DNA, 80 bp, synthetic construct; identical to SEQ ID NO: 43078
  source 1..80: mol_type = other DNA

SEQ ID NO: 76804 - DNA, 80 bp, synthetic construct; identical to SEQ ID NO: 43079
  source 1..80: mol_type = other DNA

SEQ ID NO: 76805 - DNA, 80 bp, synthetic construct; identical to SEQ ID NO: 14644
  source 1..80: mol_type = other DNA

SEQ ID NO: 76806 - DNA, 80 bp, synthetic construct; identical to SEQ ID NO: 43081
  source 1..80: mol_type = other DNA

SEQ ID NO: 76807 - DNA, 80 bp, synthetic construct; identical to SEQ ID NO: 43082
  source 1..80: mol_type = other DNA

SEQ ID NO: 76808 - DNA, 80 bp, synthetic construct; identical to SEQ ID NO: 43083
  source 1..80: mol_type = other DNA

SEQ ID NO: 76809 - DNA, 80 bp, synthetic construct; identical to SEQ ID NO: 43084
  source 1..80: mol_type = other DNA

SEQ ID NO: 76810 - DNA, 80 bp, synthetic construct; identical to SEQ ID NO: 14645
  source 1..80: mol_type = other DNA

SEQ ID NO: 76811 - DNA, 80 bp, synthetic construct; identical to SEQ ID NO: 43086
  source 1..80: mol_type = other DNA

SEQ ID NO: 76812 - DNA, 80 bp, synthetic construct; identical to SEQ ID NO: 43087
  source 1..80: mol_type = other DNA

SEQ ID NO: 76813 - DNA, 80 bp, synthetic construct; identical to SEQ ID NO: 43088
  source 1..80: mol_type = other DNA

SEQ ID NO: 76814 - DNA, 80 bp, synthetic construct; identical to SEQ ID NO: 14646
  source 1..80: mol_type = other DNA

SEQ ID NO: 76815 - DNA, 80 bp, synthetic construct; identical to SEQ ID NO: 43090
  source 1..80: mol_type = other DNA

SEQ ID NO: 76816 - DNA, 80 bp, synthetic construct; identical to SEQ ID NO: 43091
  source 1..80: mol_type = other DNA

SEQ ID NO: 76817 - DNA, 80 bp, synthetic construct; identical to SEQ ID NO: 43092
  source 1..80: mol_type = other DNA

SEQ ID NO: 76818 - DNA, 80 bp, synthetic construct; identical to SEQ ID NO: 14647
  source 1..80: mol_type = other DNA

SEQ ID NO: 76819 - DNA, 80 bp, synthetic construct; identical to SEQ ID NO: 43094
  source 1..80: mol_type = other DNA

SEQ ID NO: 76820 - DNA, 80 bp, synthetic construct; identical to SEQ ID NO: 43095
  source 1..80: mol_type = other DNA

SEQ ID NO: 76821 - DNA, 80 bp, synthetic construct; identical to SEQ ID NO: 43096
  source 1..80: mol_type = other DNA

SEQ ID NO: 76822 - DNA, 80 bp, synthetic construct; identical to SEQ ID NO: 14648
  source 1..80: mol_type = other DNA

SEQ ID NO: 76823 - DNA, 80 bp, synthetic construct; identical to SEQ ID NO: 43098
  source 1..80: mol_type = other DNA

SEQ ID NO: 76824 - DNA, 80 bp, synthetic construct; identical to SEQ ID NO: 43099
  source 1..80: mol_type = other DNA

SEQ ID NO: 76825 - DNA, 80 bp, synthetic construct; identical to SEQ ID NO: 43100
  source 1..80: mol_type = other DNA

SEQ ID NO: 76826 - DNA, 80 bp, synthetic construct; identical to SEQ ID NO: 14649
  source 1..80: mol_type = other DNA

SEQ ID NO: 76827 - DNA, 80 bp, synthetic construct; identical to SEQ ID NO: 43102
  source 1..80: mol_type = other DNA

SEQ ID NO: 76828 - DNA, 80 bp, synthetic construct; identical to SEQ ID NO: 43103
  source 1..80: mol_type = other DNA

SEQ ID NO: 76829 - DNA, 80 bp, synthetic construct; identical to SEQ ID NO: 43104
  source 1..80: mol_type = other DNA

SEQ ID NO: 76830 - DNA, 80 bp, synthetic construct; identical to SEQ ID NO: 14650
  source 1..80: mol_type = other DNA

SEQ ID NO: 76831 - DNA, 80 bp, synthetic construct; identical to SEQ ID NO: 43106
  source 1..80: mol_type = other DNA

SEQ ID NO: 76832 - DNA, 80 bp, synthetic construct; identical to SEQ ID NO: 43107
  source 1..80: mol_type = other DNA

SEQ ID NO: 76833 - DNA, 80 bp, synthetic construct; identical to SEQ ID NO: 43108
  source 1..80: mol_type = other DNA

SEQ ID NO: 76834 - DNA, 80 bp, synthetic construct; identical to SEQ ID NO: 14651
  source 1..80: mol_type = other DNA

SEQ ID NO: 76835 - DNA, 80 bp, synthetic construct; identical to SEQ ID NO: 43110
  source 1..80: mol_type = other DNA

SEQ ID NO: 76836 - DNA, 80 bp, synthetic construct; identical to SEQ ID NO: 43111
  source 1..80: mol_type = other DNA

SEQ ID NO: 76837 - DNA, 80 bp, synthetic construct; identical to SEQ ID NO: 43112
  source 1..80: mol_type = other DNA

SEQ ID NO: 76838 - DNA, 80 bp, synthetic construct; identical to SEQ ID NO: 14652
  source 1..80: mol_type = other DNA

SEQ ID NO: 76839 - DNA, 80 bp, synthetic construct; identical to SEQ ID NO: 43114
  source 1..80: mol_type = other DNA

SEQ ID NO: 76840 - DNA, 80 bp, synthetic construct; identical to SEQ ID NO: 43115
  source 1..80: mol_type = other DNA

SEQ ID NO: 76841 - DNA, 80 bp, synthetic construct; identical to SEQ ID NO: 43116
  source 1..80: mol_type = other DNA

SEQ ID NO: 76842 - DNA, 80 bp, synthetic construct; identical to SEQ ID NO: 43117
  source 1..80: mol_type = other DNA

SEQ ID NO: 76843 - DNA, 80 bp, synthetic construct; identical to SEQ ID NO: 14653
  source 1..80: mol_type = other DNA

SEQ ID NO: 76844 - DNA, 80 bp, synthetic construct; identical to SEQ ID NO: 43119
  source 1..80: mol_type = other DNA

SEQ ID NO: 76845 - DNA, 80 bp, synthetic construct; identical to SEQ ID NO: 43120
  source 1..80: mol_type = other DNA

SEQ ID NO: 76846 - DNA, 80 bp, synthetic construct; identical to SEQ ID NO: 43121
  source 1..80: mol_type = other DNA

SEQ ID NO: 76847 - DNA, 80 bp, synthetic construct; identical to SEQ ID NO: 14654
  source 1..80: mol_type = other DNA

SEQ ID NO: 76848 - DNA, 80 bp, synthetic construct; identical to SEQ ID NO: 43123
  source 1..80: mol_type = other DNA

SEQ ID NO: 76849 - DNA, 80 bp, synthetic construct; identical to SEQ ID NO: 43124
  source 1..80: mol_type = other DNA

SEQ ID NO: 76850 - DNA, 80 bp, synthetic construct; identical to SEQ ID NO: 43125
  source 1..80: mol_type = other DNA

SEQ ID NO: 76851 - DNA, 80 bp, synthetic construct; identical to SEQ ID NO: 14655
  source 1..80: mol_type = other DNA

SEQ ID NO: 76852 - DNA, 80 bp, synthetic construct; identical to SEQ ID NO: 43127
  source 1..80: mol_type = other DNA

SEQ ID NO: 76853 - DNA, 80 bp, synthetic construct; identical to SEQ ID NO: 43128
  source 1..80: mol_type = other DNA

SEQ ID NO: 76854 - DNA, 80 bp, synthetic construct; identical to SEQ ID NO: 14656
  source 1..80: mol_type = other DNA

SEQ ID NO: 76855 - DNA, 80 bp, synthetic construct; identical to SEQ ID NO: 43130
  source 1..80: mol_type = other DNA

SEQ ID NO: 76856 - DNA, 80 bp, synthetic construct; identical to SEQ ID NO: 43131
  source 1..80: mol_type = other DNA

SEQ ID NO: 76857 - DNA, 80 bp, synthetic construct; identical to SEQ ID NO: 43132
  source 1..80: mol_type = other DNA

SEQ ID NO: 76858 - DNA, 80 bp, synthetic construct; identical to SEQ ID NO: 14657
  source 1..80: mol_type = other DNA

SEQ ID NO: 76859 - DNA, 80 bp, synthetic construct; identical to SEQ ID NO: 43134
  source 1..80: mol_type = other DNA

SEQ ID NO: 76860 - DNA, 80 bp, synthetic construct; identical to SEQ ID NO: 43135
  source 1..80: mol_type = other DNA

SEQ ID NO: 76861 - DNA, 80 bp, synthetic construct; identical to SEQ ID NO: 43136
  source 1..80: mol_type = other DNA

SEQ ID NO: 76862 - DNA, 80 bp, synthetic construct; identical to SEQ ID NO: 14658
  source 1..80: mol_type = other DNA

SEQ ID NO: 76863 - DNA, 80 bp, synthetic construct; identical to SEQ ID NO: 43139
  source 1..80: mol_type = other DNA

SEQ ID NO: 76864 - DNA, 80 bp, synthetic construct; identical to SEQ ID NO: 43140
  source 1..80: mol_type = other DNA

SEQ ID NO: 76865 - DNA, 80 bp, synthetic construct; identical to SEQ ID NO: 43141
  source 1..80: mol_type = other DNA

SEQ ID NO: 76866 - DNA, 80 bp, synthetic construct; identical to SEQ ID NO: 14659
  source 1..80: mol_type = other DNA

SEQ ID NO: 76867 - DNA, 80 bp, synthetic construct; identical to SEQ ID NO: 43143
  source 1..80: mol_type = other DNA

SEQ ID NO: 76868 - DNA, 80 bp, synthetic construct; identical to SEQ ID NO: 43144
  source 1..80: mol_type = other DNA

SEQ ID NO: 76869 - DNA, 80 bp, synthetic construct; identical to SEQ ID NO: 14660
  source 1..80: mol_type = other DNA

SEQ ID NO: 76870 - DNA, 80 bp, synthetic construct; identical to SEQ ID NO: 43146
  source 1..80: mol_type = other DNA

SEQ ID NO: 76871 - DNA, 80 bp, synthetic construct; identical to SEQ ID NO: 43147
  source 1..80: mol_type = other DNA

SEQ ID NO: 76872 - DNA, 80 bp, synthetic construct; identical to SEQ ID NO: 43148
  source 1..80: mol_type = other DNA

SEQ ID NO: 76873 - DNA, 80 bp, synthetic construct; identical to SEQ ID NO: 43149
  source 1..80: mol_type = other DNA

SEQ ID NO: 76874 - DNA, 80 bp, synthetic construct; identical to SEQ ID NO: 14661
  source 1..80: mol_type = other DNA

SEQ ID NO: 76875 - DNA, 80 bp, synthetic construct; identical to SEQ ID NO: 43151
  source 1..80: mol_type = other DNA

SEQ ID NO: 76876 - DNA, 80 bp, synthetic construct; identical to SEQ ID NO: 43152
  source 1..80: mol_type = other DNA

SEQ ID NO: 76877 - DNA, 80 bp, synthetic construct; identical to SEQ ID NO: 14662
  source 1..80: mol_type = other DNA

SEQ ID NO: 76878 - DNA, 80 bp, synthetic construct; identical to SEQ ID NO: 43155
  source 1..80: mol_type = other DNA

SEQ ID NO: 76879 - DNA, 80 bp, synthetic construct; identical to SEQ ID NO: 43156
  source 1..80: mol_type = other DNA

SEQ ID NO: 76880 - DNA, 80 bp, synthetic construct; identical to SEQ ID NO: 43157
  source 1..80: mol_type = other DNA

SEQ ID NO: 76881 - DNA, 80 bp, synthetic construct; identical to SEQ ID NO: 14663
  source 1..80: mol_type = other DNA

SEQ ID NO: 76882 - DNA, 80 bp, synthetic construct; identical to SEQ ID NO: 43159
  source 1..80: mol_type = other DNA

SEQ ID NO: 76883 - DNA, 80 bp, synthetic construct; identical to SEQ ID NO: 43160
  source 1..80: mol_type = other DNA

SEQ ID NO: 76884 - DNA, 80 bp, synthetic construct; identical to SEQ ID NO: 43161
  source 1..80: mol_type = other DNA

SEQ ID NO: 76885 - DNA, 80 bp, synthetic construct; identical to SEQ ID NO: 14664
  source 1..80: mol_type = other DNA

SEQ ID NO: 76886 - DNA, 80 bp, synthetic construct; identical to SEQ ID NO: 43163
  source 1..80: mol_type = other DNA

SEQ ID NO: 76887 - DNA, 80 bp, synthetic construct; identical to SEQ ID NO: 43164
  source 1..80: mol_type = other DNA

SEQ ID NO: 76888 - DNA, 80 bp, synthetic construct; identical to SEQ ID NO: 43165
  source 1..80: mol_type = other DNA

SEQ ID NO: 76889 - DNA, 80 bp, synthetic construct; identical to SEQ ID NO: 43166
  source 1..80: mol_type = other DNA

SEQ ID NO: 76890 - DNA, 80 bp, synthetic construct; identical to SEQ ID NO: 14665
  source 1..80: mol_type = other DNA

SEQ ID NO: 76891 - DNA, 80 bp, synthetic construct; identical to SEQ ID NO: 43168
  source 1..80: mol_type = other DNA

SEQ ID NO: 76892 - DNA, 80 bp, synthetic construct; identical to SEQ ID NO: 43169
  source 1..80: mol_type = other DNA

SEQ ID NO: 76893 - DNA, 80 bp, synthetic construct; identical to SEQ ID NO: 43170
  source 1..80: mol_type = other DNA

SEQ ID NO: 76894 - DNA, 80 bp, synthetic construct; identical to SEQ ID NO: 14666
  source 1..80: mol_type = other DNA

SEQ ID NO: 76895 - DNA, 80 bp, synthetic construct; identical to SEQ ID NO: 43173
  source 1..80: mol_type = other DNA

SEQ ID NO: 76896 - DNA, 80 bp, synthetic construct; identical to SEQ ID NO: 14667
  source 1..80: mol_type = other DNA

SEQ ID NO: 76897 - DNA, 80 bp, synthetic construct; identical to SEQ ID NO: 43175
  source 1..80: mol_type = other DNA

SEQ ID NO: 76898 - DNA, 80 bp, synthetic construct; identical to SEQ ID NO: 43176
  source 1..80: mol_type = other DNA

SEQ ID NO: 76899 - DNA, 80 bp, synthetic construct; identical to SEQ ID NO: 43177
  source 1..80: mol_type = other DNA

SEQ ID NO: 76900 - DNA, 80 bp, synthetic construct; identical to SEQ ID NO: 14668
  source 1..80: mol_type = other DNA

SEQ ID NO: 76901 - DNA, 80 bp, synthetic construct; identical to SEQ ID NO: 43179
  source 1..80: mol_type = other DNA

SEQ ID NO: 76902 - DNA, 80 bp, synthetic construct; identical to SEQ ID NO: 43180
  source 1..80: mol_type = other DNA

SEQ ID NO: 76903 - DNA, 80 bp, synthetic construct; identical to SEQ ID NO: 43181
  source 1..80: mol_type = other DNA

SEQ ID NO: 76904 - DNA, 80 bp, synthetic construct; identical to SEQ ID NO: 43182
  source 1..80: mol_type = other DNA

SEQ ID NO: 76905 - DNA, 80 bp, synthetic construct; identical to SEQ ID NO: 14669
  source 1..80: mol_type = other DNA

SEQ ID NO: 76906 - DNA, 80 bp, synthetic construct; identical to SEQ ID NO: 43184
  source 1..80: mol_type = other DNA

SEQ ID NO: 76907 - DNA, 80 bp, synthetic construct; identical to SEQ ID NO: 43185
  source 1..80: mol_type = other DNA

SEQ ID NO: 76908 - DNA, 80 bp, synthetic construct; identical to SEQ ID NO: 43186
  source 1..80: mol_type = other DNA

SEQ ID NO: 76909 - DNA, 80 bp, synthetic construct; identical to SEQ ID NO: 14670
  source 1..80: mol_type = other DNA

SEQ ID NO: 76910 - DNA, 80 bp, synthetic construct; identical to SEQ ID NO: 43188
  source 1..80: mol_type = other DNA

SEQ ID NO: 76911 - DNA, 80 bp, synthetic construct; identical to SEQ ID NO: 43189
  source 1..80: mol_type = other DNA

SEQ ID NO: 76912 - DNA, 80 bp, synthetic construct; identical to SEQ ID NO: 14671
  source 1..80: mol_type = other DNA

SEQ ID NO: 76913 - DNA, 80 bp, synthetic construct; identical to SEQ ID NO: 43192
  source 1..80: mol_type = other DNA

SEQ ID NO: 76914 - DNA, 80 bp, synthetic construct; identical to SEQ ID NO: 43193
  source 1..80: mol_type = other DNA

SEQ ID NO: 76915 - DNA, 80 bp, synthetic construct; identical to SEQ ID NO: 14672
  source 1..80: mol_type = other DNA

SEQ ID NO: 76916 - DNA, 80 bp, synthetic construct; identical to SEQ ID NO: 43195
  source 1..80: mol_type = other DNA

SEQ ID NO: 76917 - DNA, 80 bp, synthetic construct; identical to SEQ ID NO: 43196
  source 1..80: mol_type = other DNA

SEQ ID NO: 76918 - DNA, 80 bp, synthetic construct; identical to SEQ ID NO: 43197
  source 1..80: mol_type = other DNA

SEQ ID NO: 76919 - DNA, 80 bp, synthetic construct; identical to SEQ ID NO: 14673
  source 1..80: mol_type = other DNA

SEQ ID NO: 76920 - DNA, 80 bp, synthetic construct; identical to SEQ ID NO: 43199
  source 1..80: mol_type = other DNA

SEQ ID NO: 76921 - DNA, 80 bp, synthetic construct; identical to SEQ ID NO: 43200
  source 1..80: mol_type = other DNA

SEQ ID NO: 76922 - DNA, 80 bp, synthetic construct; identical to SEQ ID NO: 43201
  source 1..80: mol_type = other DNA

SEQ ID NO: 76923 - DNA, 80 bp, synthetic construct; identical to SEQ ID NO: 43202
  source 1..80: mol_type = other DNA

SEQ ID NO: 76924 - DNA, 80 bp, synthetic construct; identical to SEQ ID NO: 14674
  source 1..80: mol_type = other DNA

SEQ ID NO: 76925 - DNA, 80 bp, synthetic construct; identical to SEQ ID NO: 43204
  source 1..80: mol_type = other DNA

SEQ ID NO: 76926 - DNA, 80 bp, synthetic construct; identical to SEQ ID NO: 43205
  source 1..80: mol_type = other DNA

SEQ ID NO: 76927 - DNA, 80 bp, synthetic construct; identical to SEQ ID NO: 14675
  source 1..80: mol_type = other DNA

SEQ ID NO: 76928 - DNA, 80 bp, synthetic construct; identical to SEQ ID NO: 43207
  source 1..80: mol_type = other DNA

SEQ ID NO: 76929 - DNA, 80 bp, synthetic construct; identical to SEQ ID NO: 43208
  source 1..80: mol_type = other DNA

SEQ ID NO: 76930 - DNA, 80 bp, synthetic construct; identical to SEQ ID NO: 43209
  source 1..80: mol_type = other DNA

SEQ ID NO: 76931 - DNA, 80 bp, synthetic construct; identical to SEQ ID NO: 14676
  source 1..80: mol_type = other DNA

SEQ ID NO: 76932 - DNA, 80 bp, synthetic construct; identical to SEQ ID NO: 43211
  source 1..80: mol_type = other DNA

SEQ ID NO: 76933 - DNA, 80 bp, synthetic construct; identical to SEQ ID NO: 43212
  source 1..80: mol_type = other DNA

SEQ ID NO: 76934 - DNA, 80 bp, synthetic construct; identical to SEQ ID NO: 43213
  source 1..80: mol_type = other DNA

SEQ ID NO: 76935 - DNA, 80 bp, synthetic construct; identical to SEQ ID NO: 14677
  source 1..80: mol_type = other DNA

SEQ ID NO: 76936 - DNA, 80 bp, synthetic construct; identical to SEQ ID NO: 43215
  source 1..80: mol_type = other DNA

SEQ ID NO: 76937 - DNA, 80 bp, synthetic construct; identical to SEQ ID NO: 43216
  source 1..80: mol_type = other DNA

SEQ ID NO: 76938 - DNA, 80 bp, synthetic construct; identical to SEQ ID NO: 43217
  source 1..80: mol_type = other DNA

SEQ ID NO: 76939 - DNA, 80 bp, synthetic construct; identical to SEQ ID NO: 43218
  source 1..80: mol_type = other DNA

SEQ ID NO: 76940 - DNA, 80 bp, synthetic construct; identical to SEQ ID NO: 14678
  source 1..80: mol_type = other DNA

SEQ ID NO: 76941 - DNA, 80 bp, synthetic construct; identical to SEQ ID NO: 43220
  source 1..80: mol_type = other DNA

SEQ ID NO: 76942 - DNA, 80 bp, synthetic construct; identical to SEQ ID NO: 43221
  source 1..80: mol_type = other DNA

SEQ ID NO: 76943 - DNA, 80 bp, synthetic construct; identical to SEQ ID NO: 14679
  source 1..80: mol_type = other DNA

SEQ ID NO: 76944 - DNA, 80 bp, synthetic construct; identical to SEQ ID NO: 43223
  source 1..80: mol_type = other DNA

SEQ ID NO: 76945 - DNA, 80 bp, synthetic construct; identical to SEQ ID NO: 43224
  source 1..80: mol_type = other DNA

SEQ ID NO: 76946 - DNA, 80 bp, synthetic construct; identical to SEQ ID NO: 43225
  source 1..80: mol_type = other DNA

SEQ ID NO: 76947 - DNA, 80 bp, synthetic construct; identical to SEQ ID NO: 43226
  source 1..80: mol_type = other DNA

SEQ ID NO: 76948 - DNA, 80 bp, synthetic construct; identical to SEQ ID NO: 14680
  source 1..80: mol_type = other DNA

SEQ ID NO: 76949 - DNA, 80 bp, synthetic construct; identical to SEQ ID NO: 43228
  source 1..80: mol_type = other DNA

SEQ ID NO: 76950 - DNA, 80 bp, synthetic construct; identical to SEQ ID NO: 43229
  source 1..80: mol_type = other DNA

SEQ ID NO: 76951 - DNA, 80 bp, synthetic construct; identical to SEQ ID NO: 43230
  source 1..80: mol_type = other DNA

SEQ ID NO: 76952 - DNA, 80 bp, synthetic construct; identical to SEQ ID NO: 14681
  source 1..80: mol_type = other DNA

SEQ ID NO: 76953 - DNA, 80 bp, synthetic construct; identical to SEQ ID NO: 43232
  source 1..80: mol_type = other DNA

SEQ ID NO: 76954 - DNA, 80 bp, synthetic construct; identical to SEQ ID NO: 43233
  source 1..80: mol_type = other DNA

SEQ ID NO: 76955 - DNA, 80 bp, synthetic construct; identical to SEQ ID NO: 43234
  source 1..80: mol_type = other DNA

SEQ ID NO: 76956 - DNA, 80 bp, synthetic construct; identical to SEQ ID NO: 14682
  source 1..80: mol_type = other DNA

SEQ ID NO: 76957 - DNA, 80 bp, synthetic construct; identical to SEQ ID NO: 43236
  source 1..80: mol_type = other DNA

SEQ ID NO: 76958 - DNA, 80 bp, synthetic construct; identical to SEQ ID NO: 43237
  source 1..80: mol_type = other DNA

SEQ ID NO: 76959 - DNA, 80 bp, synthetic construct; identical to SEQ ID NO: 43238
  source 1..80: mol_type = other DNA

SEQ ID NO: 76960 - DNA, 80 bp, synthetic construct; identical to SEQ ID NO: 14683
  source 1..80: mol_type = other DNA

SEQ ID NO: 76961 - DNA, 80 bp, synthetic construct; identical to SEQ ID NO: 43240
  source 1..80: mol_type = other DNA

SEQ ID NO: 76962 - DNA, 80 bp, synthetic construct; identical to SEQ ID NO: 43241
  source 1..80: mol_type = other DNA

SEQ ID NO: 76963 - DNA, 80 bp, synthetic construct; identical to SEQ ID NO: 43242
  source 1..80: mol_type = other DNA

SEQ ID NO: 76964 - DNA, 80 bp, synthetic construct; identical to SEQ ID NO: 14684
  source 1..80: mol_type = other DNA

SEQ ID NO: 76965 - DNA, 80 bp, synthetic construct; identical to SEQ ID NO: 43244
  source 1..80: mol_type = other DNA

SEQ ID NO: 76966 - DNA, 80 bp, synthetic construct; identical to SEQ ID NO: 43245
  source 1..80: mol_type = other DNA

SEQ ID NO: 76967 - DNA, 80 bp, synthetic construct; identical to SEQ ID NO: 14685
  source 1..80: mol_type = other DNA

SEQ ID NO: 76968 - DNA, 80 bp, synthetic construct; identical to SEQ ID NO: 43247
  source 1..80: mol_type = other DNA

SEQ ID NO: 76969 - DNA, 80 bp, synthetic construct; identical to SEQ ID NO: 43249
  source 1..80: mol_type = other DNA

SEQ ID NO: 76970 - DNA, 80 bp, synthetic construct; identical to SEQ ID NO: 14686
  source 1..80: mol_type = other DNA

SEQ ID NO: 76971 - DNA, 80 bp, synthetic construct; identical to SEQ ID NO: 43252
  source 1..80: mol_type = other DNA

SEQ ID NO: 76972 - DNA, 80 bp, synthetic construct; identical to SEQ ID NO: 14687
  source 1..80: mol_type = other DNA

SEQ ID NO: 76973 - DNA, 80 bp, synthetic construct; identical to SEQ ID NO: 43256
  source 1..80: mol_type = other DNA

SEQ ID NO: 76974 - DNA, 80 bp, synthetic construct; identical to SEQ ID NO: 14688
  source 1..80: mol_type = other DNA

SEQ ID NO: 76975 - DNA, 80 bp, synthetic construct; identical to SEQ ID NO: 43260
  source 1..80: mol_type = other DNA

SEQ ID NO: 76976 - DNA, 80 bp, synthetic construct; identical to SEQ ID NO: 14689
  source 1..80: mol_type = other DNA

SEQ ID NO: 76977 - DNA, 80 bp, synthetic construct; identical to SEQ ID NO: 43264
  source 1..80: mol_type = other DNA

SEQ ID NO: 76978 - DNA, 80 bp, synthetic construct; identical to SEQ ID NO: 43266
  source 1..80: mol_type = other DNA

SEQ ID NO: 76979 - DNA, 80 bp, synthetic construct; identical to SEQ ID NO: 43268
  source 1..80: mol_type = other DNA

SEQ ID NO: 76980 - DNA, 80 bp, synthetic construct; identical to SEQ ID NO: 43270
  source 1..80: mol_type = other DNA

SEQ ID NO: 76981 - DNA, 80 bp, synthetic construct; identical to SEQ ID NO: 43272
  source 1..80: mol_type = other DNA

SEQ ID NO: 76982 - DNA, 80 bp, synthetic construct; identical to SEQ ID NO: 43273
  source 1..80: mol_type = other DNA

SEQ ID NO: 76983 - DNA, 80 bp, synthetic construct; identical to SEQ ID NO: 14692
  source 1..80: mol_type = other DNA

SEQ ID NO: 76984 - DNA, 80 bp, synthetic construct; identical to SEQ ID NO: 43275
  source 1..80: mol_type = other DNA

SEQ ID NO: 76985 - DNA, 80 bp, synthetic construct; identical to SEQ ID NO: 43276
  source 1..80: mol_type = other DNA

SEQ ID NO: 76986 - DNA, 80 bp, synthetic construct; identical to SEQ ID NO: 43277
  source 1..80: mol_type = other DNA

SEQ ID NO: 76987 - DNA, 80 bp, synthetic construct; identical to SEQ ID NO: 14693
  source 1..80: mol_type = other DNA

SEQ ID NO: 76988 - DNA, 80 bp, synthetic construct; identical to SEQ ID NO: 43279
  source 1..80: mol_type = other DNA

SEQ ID NO: 76989 - DNA, 80 bp, synthetic construct; identical to SEQ ID NO: 43280
  source 1..80: mol_type = other DNA

SEQ ID NO: 76990 - DNA, 80 bp, synthetic construct; identical to SEQ ID NO: 43281
  source 1..80: mol_type = other DNA

SEQ ID NO: 76991 - DNA, 80 bp, synthetic construct; identical to SEQ ID NO: 14694
  source 1..80: mol_type = other DNA

SEQ ID NO: 76992 - DNA, 80 bp, synthetic construct; identical to SEQ ID NO: 43283
  source 1..80: mol_type = other DNA

SEQ ID NO: 76993 - DNA, 80 bp, synthetic construct; identical to SEQ ID NO: 43284
  source 1..80: mol_type = other DNA

SEQ ID NO: 76994 - DNA, 80 bp, synthetic construct; identical to SEQ ID NO: 43285
  source 1..80: mol_type = other DNA

SEQ ID NO: 76995 - DNA, 80 bp, synthetic construct; identical to SEQ ID NO: 14695
  source 1..80: mol_type = other DNA

SEQ ID NO: 76996 - DNA, 80 bp, synthetic construct; identical to SEQ ID NO: 43287
  source 1..80: mol_type = other DNA

SEQ ID NO: 76997 - DNA, 80 bp, synthetic construct; identical to SEQ ID NO: 43288
  source 1..80: mol_type = other DNA

SEQ ID NO: 76998 - DNA, 80 bp, synthetic construct; identical to SEQ ID NO: 43289
  source 1..80: mol_type = other DNA

SEQ ID NO: 76999 - DNA, 80 bp, synthetic construct; identical to SEQ ID NO: 43290
  source 1..80: mol_type = other DNA

SEQ ID NO: 77000 - DNA, 80 bp, synthetic construct; identical to SEQ ID NO: 14696
  source 1..80: mol_type = other DNA

SEQ ID NO: 77001 - DNA, 80 bp, synthetic construct; identical to SEQ ID NO: 43292
  source 1..80: mol_type = other DNA

SEQ ID NO: 77002 - DNA, 80 bp, synthetic construct; identical to SEQ ID NO: 43293
  source 1..80: mol_type = other DNA

SEQ ID NO: 77003 - DNA, 80 bp, synthetic construct; identical to SEQ ID NO: 14697
  source 1..80: mol_type = other DNA

SEQ ID NO: 77004 - DNA, 80 bp, synthetic construct; identical to SEQ ID NO: 43295
  source 1..80: mol_type = other DNA

SEQ ID NO: 77005 - DNA, 80 bp, synthetic construct; identical to SEQ ID NO: 43296
  source 1..80: mol_type = other DNA

SEQ ID NO: 77006 - DNA, 80 bp, synthetic construct; identical to SEQ ID NO: 43297
  source 1..80: mol_type = other DNA

SEQ ID NO: 77007 - DNA, 80 bp, synthetic construct; identical to SEQ ID NO: 14698
  source 1..80: mol_type = other DNA

SEQ ID NO: 77008 - DNA, 80 bp, synthetic construct; identical to SEQ ID NO: 43299
  source 1..80: mol_type = other DNA

SEQ ID NO: 77009 - DNA, 80 bp, synthetic construct; identical to SEQ ID NO: 43300
  source 1..80: mol_type = other DNA

SEQ ID NO: 77010 - DNA, 80 bp, synthetic construct; identical to SEQ ID NO: 43301
  source 1..80: mol_type = other DNA

SEQ ID NO: 77011 - DNA, 80 bp, synthetic construct; identical to SEQ ID NO: 14699
  source 1..80: mol_type = other DNA

SEQ ID NO: 77012 - DNA, 80 bp, synthetic construct; identical to SEQ ID NO: 43303
  source 1..80: mol_type = other DNA

SEQ ID NO: 77013 - DNA, 80 bp, synthetic construct; identical to SEQ ID NO: 43304
  source 1..80: mol_type = other DNA

SEQ ID NO: 77014 - DNA, 80 bp, synthetic construct; identical to SEQ ID NO: 43305
  source 1..80: mol_type = other DNA

SEQ ID NO: 77015 - DNA, 80 bp, synthetic construct; identical to SEQ ID NO: 43306
  source 1..80: mol_type = other DNA

SEQ ID NO: 77016 - DNA, 80 bp, synthetic construct; identical to SEQ ID NO: 14700
  source 1..80: mol_type = other DNA

SEQ ID NO: 77017 - DNA, 80 bp, synthetic construct; identical to SEQ ID NO: 43308
  source 1..80: mol_type = other DNA

SEQ ID NO: 77018 - DNA, 80 bp, synthetic construct; identical to SEQ ID NO: 43309
  source 1..80: mol_type = other DNA

SEQ ID NO: 77019 - DNA, 80 bp, synthetic construct; identical to SEQ ID NO: 14701
  source 1..80: mol_type = other DNA

SEQ ID NO: 77020 - DNA, 80 bp, synthetic construct; identical to SEQ ID NO: 43311
  source 1..80: mol_type = other DNA

SEQ ID NO: 77021 - DNA, 80 bp, synthetic construct; identical to SEQ ID NO: 43312
  source 1..80: mol_type = other DNA

SEQ ID NO: 77022 - DNA, 80 bp, synthetic construct; identical to SEQ ID NO: 43313
  source 1..80: mol_type = other DNA

SEQ ID NO: 77023 - DNA, 80 bp, synthetic construct; identical to SEQ ID NO: 14702
  source 1..80: mol_type = other DNA

SEQ ID NO: 77024 - DNA, 80 bp, synthetic construct; identical to SEQ ID NO: 43315
  source 1..80: mol_type = other DNA

SEQ ID NO: 77025 - DNA, 80 bp, synthetic construct; identical to SEQ ID NO: 43316
  source 1..80: mol_type = other DNA

SEQ ID NO: 77026 - DNA, 80 bp, synthetic construct; identical to SEQ ID NO: 43317
  source 1..80: mol_type = other DNA

SEQ ID NO: 77027 - DNA, 80 bp, synthetic construct; identical to SEQ ID NO: 43318
  source 1..80: mol_type = other DNA

SEQ ID NO: 77028 - DNA, 80 bp, synthetic construct; identical to SEQ ID NO: 43320
  source 1..80: mol_type = other DNA

SEQ ID NO: 77029 - DNA, 80 bp, synthetic construct; identical to SEQ ID NO: 43321
  source 1..80: mol_type = other DNA

SEQ ID NO: 77030 - DNA, 80 bp, synthetic construct; identical to SEQ ID NO: 43322
  source 1..80: mol_type = other DNA

SEQ ID NO: 77031 - DNA, 80 bp, synthetic construct; identical to SEQ ID NO: 43323
  source 1..80: mol_type = other DNA

SEQ ID NO: 77032 - DNA, 80 bp, synthetic construct; identical to SEQ ID NO: 14704
  source 1..80: mol_type = other DNA

SEQ ID NO: 77033 - DNA, 80 bp, synthetic construct; identical to SEQ ID NO: 43325
  source 1..80: mol_type = other DNA

SEQ ID NO: 77034 - DNA, 80 bp, synthetic construct; identical to SEQ ID NO: 43326
  source 1..80: mol_type = other DNA

SEQ ID NO: 77035 - DNA, 80 bp, synthetic construct; identical to SEQ ID NO: 43327
  source 1..80: mol_type = other DNA

SEQ ID NO: 77036 - DNA, 80 bp, synthetic construct; identical to SEQ ID NO: 14705
  source 1..80: mol_type = other DNA

SEQ ID NO: 77037 - DNA, 80 bp, synthetic construct; identical to SEQ ID NO: 43329
  source 1..80: mol_type = other DNA

SEQ ID NO: 77038 - DNA, 80 bp, synthetic construct; identical to SEQ ID NO: 43330
  source 1..80: mol_type = other DNA

SEQ ID NO: 77039 - DNA, 80 bp, synthetic construct; identical to SEQ ID NO: 43331
  source 1..80: mol_type = other DNA

SEQ ID NO: 77040 - DNA, 80 bp, synthetic construct; identical to SEQ ID NO: 14706
  source 1..80: mol_type = other DNA

SEQ ID NO: 77041 - DNA, 80 bp, synthetic construct; identical to SEQ ID NO: 43333
  source 1..80: mol_type = other DNA

SEQ ID NO: 77042 - DNA, 80 bp, synthetic construct; identical to SEQ ID NO: 43335
  source 1..80: mol_type = other DNA

SEQ ID NO: 77043 - DNA, 80 bp, synthetic construct; identical to SEQ ID NO: 43337
  source 1..80: mol_type = other DNA

SEQ ID NO: 77044 - DNA, 80 bp, synthetic construct; identical to SEQ ID NO: 43339
  source 1..80: mol_type = other DNA

SEQ ID NO: 77045 - DNA, 80 bp, synthetic construct; identical to SEQ ID NO: 43341
  source 1..80: mol_type = other DNA

SEQ ID NO: 77046 - DNA, 80 bp, synthetic construct; identical to SEQ ID NO: 43343
  source 1..80: mol_type = other DNA

SEQ ID NO: 77047 - DNA, 80 bp, synthetic construct; identical to SEQ ID NO: 14709
  source 1..80: mol_type = other DNA

SEQ ID NO: 77048 - DNA, 80 bp, synthetic construct; identical to SEQ ID NO: 43347
  source 1..80: mol_type = other DNA

SEQ ID NO: 77049 - DNA, 80 bp, synthetic construct; identical to SEQ ID NO: 14710
  source 1..80: mol_type = other DNA

SEQ ID NO: 77050 - DNA, 80 bp, synthetic construct; identical to SEQ ID NO: 43351
  source 1..80: mol_type = other DNA

SEQ ID NO: 77051 - DNA, 80 bp, synthetic construct; identical to SEQ ID NO: 43353
  source 1..80: mol_type = other DNA

SEQ ID NO: 77052 - DNA, 80 bp, synthetic construct; identical to SEQ ID NO: 43354
  source 1..80: mol_type = other DNA

SEQ ID NO: 77053 - DNA, 80 bp, synthetic construct; identical to SEQ ID NO: 43356
  source 1..80: mol_type = other DNA

SEQ ID NO: 77054 - DNA, 80 bp, synthetic construct; identical to SEQ ID NO: 14712
  source 1..80: mol_type = other DNA

SEQ ID NO: 77055 - DNA, 80 bp, synthetic construct; identical to SEQ ID NO: 43359
  source 1..80: mol_type = other DNA

SEQ ID NO: 77056 - DNA, 80 bp, synthetic construct; identical to SEQ ID NO: 14713
  source 1..80: mol_type = other DNA

SEQ ID NO: 77057 - DNA, 80 bp, synthetic construct; identical to SEQ ID NO: 43361
  source 1..80: mol_type = other DNA

SEQ ID NO: 77058 - DNA, 80 bp, synthetic construct; identical to SEQ ID NO: 43362
  source 1..80: mol_type = other DNA

SEQ ID NO: 77059 - DNA, 80 bp, synthetic construct; identical to SEQ ID NO: 43363
  source 1..80: mol_type = other DNA

SEQ ID NO: 77060 - DNA, 80 bp, synthetic construct; identical to SEQ ID NO: 14714
  source 1..80: mol_type = other DNA

SEQ ID NO: 77061 - DNA, 80 bp, synthetic construct; identical to SEQ ID NO: 43365
  source 1..80: mol_type = other DNA

SEQ ID NO: 77062 - DNA, 80 bp, synthetic construct; identical to SEQ ID NO: 43366
  source 1..80: mol_type = other DNA

SEQ ID NO: 77063 - DNA, 80 bp, synthetic construct; identical to SEQ ID NO: 43367
  source 1..80: mol_type = other DNA

SEQ ID NO: 77064 - DNA, 80 bp, synthetic construct; identical to SEQ ID NO: 43368
  source 1..80: mol_type = other DNA

SEQ ID NO: 77065 - DNA, 80 bp, synthetic construct; identical to SEQ ID NO: 14715
  source 1..80: mol_type = other DNA

SEQ ID NO: 77066 - DNA, 80 bp, synthetic construct; identical to SEQ ID NO: 43370
  source 1..80: mol_type = other DNA

SEQ ID NO: 77067 - DNA, 80 bp, synthetic construct; identical to SEQ ID NO: 43371
  source 1..80: mol_type = other DNA

SEQ ID NO: 77068 - DNA, 80 bp, synthetic construct; identical to SEQ ID NO: 14716
  source 1..80: mol_type = other DNA

SEQ ID NO: 77069 - DNA, 80 bp, synthetic construct; identical to SEQ ID NO: 43373
  source 1..80: mol_type = other DNA

SEQ ID NO: 77070 - DNA, 80 bp, synthetic construct; identical to SEQ ID NO: 43374
  source 1..80: mol_type = other DNA

SEQ ID NO: 77071 - DNA, 80 bp, synthetic construct; identical to SEQ ID NO: 43375
  source 1..80: mol_type = other DNA

SEQ ID NO: 77072 - DNA, 80 bp, synthetic construct; identical to SEQ ID NO: 14717
  source 1..80: mol_type = other DNA

SEQ ID NO: 77073 - DNA, 80 bp, synthetic construct; identical to SEQ ID NO: 43377
  source 1..80: mol_type = other DNA

SEQ ID NO: 77074 - DNA, 80 bp, synthetic construct; identical to SEQ ID NO: 43378
  source 1..80: mol_type = other DNA

SEQ ID NO: 77075 - DNA, 80 bp, synthetic construct; identical to SEQ ID NO: 43379
  source 1..80: mol_type = other DNA

SEQ ID NO: 77076 - DNA, 80 bp, synthetic construct; identical to SEQ ID NO: 14718
  source 1..80: mol_type = other DNA

SEQ ID NO: 77077 - DNA, 80 bp, synthetic construct; identical to SEQ ID NO: 43381
  source 1..80: mol_type = other DNA

SEQ ID NO: 77078 - DNA, 80 bp, synthetic construct; identical to SEQ ID NO: 43382
  source 1..80: mol_type = other DNA

SEQ ID NO: 77079 - DNA, 80 bp, synthetic construct; identical to SEQ ID NO: 43383
  source 1..80: mol_type = other DNA

SEQ ID NO: 77080 - DNA, 80 bp, synthetic construct; identical to SEQ ID NO: 14719
  source 1..80: mol_type = other DNA

SEQ ID NO: 77081 - DNA, 80 bp, synthetic construct; identical to SEQ ID NO: 43385
  source 1..80: mol_type = other DNA

SEQ ID NO: 77082 - DNA, 80 bp, synthetic construct; identical to SEQ ID NO: 43386
  source 1..80: mol_type = other DNA

SEQ ID NO: 77083 - DNA, 80 bp, synthetic construct; identical to SEQ ID NO: 43387
  source 1..80: mol_type = other DNA

SEQ ID NO: 77084 - DNA, 80 bp, synthetic construct; identical to SEQ ID NO: 14720
  source 1..80: mol_type = other DNA

SEQ ID NO: 77085 - DNA, 80 bp, synthetic construct; identical to SEQ ID NO: 43390
  source 1..80: mol_type = other DNA

SEQ ID NO: 77086 - DNA, 80 bp, synthetic construct; identical to SEQ ID NO: 43391
  source 1..80: mol_type = other DNA

SEQ ID NO: 77087 - DNA, 80 bp, synthetic construct; identical to SEQ ID NO: 43392
  source 1..80: mol_type = other DNA

SEQ ID NO: 77088 - DNA, 80 bp, synthetic construct; identical to SEQ ID NO: 14721
  source 1..80: mol_type = other DNA

SEQ ID NO: 77089 - DNA, 80 bp, synthetic construct; identical to SEQ ID NO: 43394
  source 1..80: mol_type = other DNA

SEQ ID NO: 77090 - DNA, 80 bp, synthetic construct; identical to SEQ ID NO: 43395
  source 1..80: mol_type = other DNA

SEQ ID NO: 77091 - DNA, 80 bp, synthetic construct; identical to SEQ ID NO: 14722
  source 1..80: mol_type = other DNA

SEQ ID NO: 77092 - DNA, 80 bp, synthetic construct; identical to SEQ ID NO: 43397
  source 1..80: mol_type = other DNA

SEQ ID NO: 77093 - DNA, 80 bp, synthetic construct; identical to SEQ ID NO: 43398
  source 1..80: mol_type = other DNA

SEQ ID NO: 77094 - DNA, 80 bp, synthetic construct; identical to SEQ ID NO: 43399
  source 1..80: mol_type = other DNA

SEQ ID NO: 77095 - DNA, 80 bp, synthetic construct; identical to SEQ ID NO: 14723
  source 1..80: mol_type = other DNA

SEQ ID NO: 77096 - DNA, 80 bp, synthetic construct; identical to SEQ ID NO: 43402
  source 1..80: mol_type = other DNA

SEQ ID NO: 77097 - DNA, 80 bp, synthetic construct; identical to SEQ ID NO: 43403
  source 1..80: mol_type = other DNA

SEQ ID NO: 77098 - DNA, 80 bp, synthetic construct; identical to SEQ ID NO: 43404
  source 1..80: mol_type = other DNA

SEQ ID NO: 77099 - DNA, 80 bp, synthetic construct; identical to SEQ ID NO: 14724
  source 1..80: mol_type = other DNA

SEQ ID NO: 77100 - DNA, 80 bp, synthetic construct; identical to SEQ ID NO: 43406
  source 1..80: mol_type = other DNA

SEQ ID NO: 77101 - DNA, 80 bp, synthetic construct; identical to SEQ ID NO: 43407
  source 1..80: mol_type = other DNA

SEQ ID NO: 77102 - DNA, 80 bp, synthetic construct; identical to SEQ ID NO: 43408
  source 1..80: mol_type = other DNA

SEQ ID NO: 77103 - DNA, 80 bp, synthetic construct; identical to SEQ ID NO: 14725
  source 1..80: mol_type = other DNA

SEQ ID NO: 77104 - DNA, 80 bp, synthetic construct; identical to SEQ ID NO: 43410
  source 1..80: mol_type = other DNA

SEQ ID NO: 77105 - DNA, 80 bp, synthetic construct; identical to SEQ ID NO: 43411
  source 1..80: mol_type = other DNA

SEQ ID NO: 77106 - DNA, 80 bp, synthetic construct; identical to SEQ ID NO: 43413
  source 1..80: mol_type = other DNA

SEQ ID NO: 77107 - DNA, 80 bp, synthetic construct; identical to SEQ ID NO: 43414
  source 1..80: mol_type = other DNA

SEQ ID NO: 77108 - DNA, 80 bp, synthetic construct; identical to SEQ ID NO: 43415
  source 1..80: mol_type = other DNA

SEQ ID NO: 77109 - DNA, 80 bp, synthetic construct; identical to SEQ ID NO: 43416
  source 1..80: mol_type = other DNA

SEQ ID NO: 77110 - DNA, 80 bp, synthetic construct; identical to SEQ ID NO: 14727
  source 1..80: mol_type = other DNA

SEQ ID NO: 77111 - DNA, 80 bp, synthetic construct; identical to SEQ ID NO: 43418
  source 1..80: mol_type = other DNA

SEQ ID NO: 77112 - DNA, 80 bp, synthetic construct; identical to SEQ ID NO: 43419
  source 1..80: mol_type = other DNA

SEQ ID NO: 77113 - DNA, 80 bp, synthetic construct; identical to SEQ ID NO: 14728
  source 1..80: mol_type = other DNA

SEQ ID NO: 77114 - DNA, 80 bp, synthetic construct; identical to SEQ ID NO: 43421
  source 1..80: mol_type = other DNA

SEQ ID NO: 77115 - DNA, 80 bp, synthetic construct; identical to SEQ ID NO: 43422
  source 1..80: mol_type = other DNA

SEQ ID NO: 77116 - DNA, 80 bp, synthetic construct; identical to SEQ ID NO: 43423
  source 1..80: mol_type = other DNA

SEQ ID NO: 77117 - DNA, 80 bp, synthetic construct; identical to SEQ ID NO: 14729
  source 1..80: mol_type = other DNA

SEQ ID NO: 77118 - DNA, 80 bp, synthetic construct; identical to SEQ ID NO: 43426
  source 1..80: mol_type = other DNA

SEQ ID NO: 77119 - DNA, 80 bp, synthetic construct; identical to SEQ ID NO: 43427
  source 1..80: mol_type = other DNA

SEQ ID NO: 77120 - DNA, 80 bp, synthetic construct; identical to SEQ ID NO: 43428
  source 1..80: mol_type = other DNA

SEQ ID NO: 77121 - DNA, 80 bp, synthetic construct; identical to SEQ ID NO: 14730
  source 1..80: mol_type = other DNA

SEQ ID NO: 77122 - DNA, 80 bp, synthetic construct; identical to SEQ ID NO: 43430
  source 1..80: mol_type = other DNA

SEQ ID NO: 77123 - DNA, 80 bp, synthetic construct; identical to SEQ ID NO: 43431
  source 1..80: mol_type = other DNA

SEQ ID NO: 77124 - DNA, 80 bp, synthetic construct; identical to SEQ ID NO: 43433
  source 1..80: mol_type = other DNA

SEQ ID NO: 77125 - DNA, 80 bp, synthetic construct; identical to SEQ ID NO: 43434
  source 1..80: mol_type = other DNA

SEQ ID NO: 77126 - DNA, 80 bp, synthetic construct; identical to SEQ ID NO: 43435
  source 1..80: mol_type = other DNA

SEQ ID NO: 77127 - DNA, 80 bp, synthetic construct; identical to SEQ ID NO: 43436
  source 1..80: mol_type = other DNA

SEQ ID NO: 77128 - DNA, 80 bp, synthetic construct; identical to SEQ ID NO: 14732
  source 1..80: mol_type = other DNA

SEQ ID NO: 77129 - DNA, 80 bp, synthetic construct; identical to SEQ ID NO: 43439
  source 1..80: mol_type = other DNA

SEQ ID NO: 77130 - DNA, 80 bp, synthetic construct; identical to SEQ ID NO: 43440
  source 1..80: mol_type = other DNA

SEQ ID NO: 77131 - DNA, 80 bp, synthetic construct; identical to SEQ ID NO: 14733
  source 1..80: mol_type = other DNA

SEQ ID NO: 77132 - DNA, 80 bp, synthetic construct; identical to SEQ ID NO: 43442
  source 1..80: mol_type = other DNA

SEQ ID NO: 77133 - DNA, 80 bp, synthetic construct; identical to SEQ ID NO: 43443
  source 1..80: mol_type = other DNA

SEQ ID NO: 77134 - DNA, 80 bp, synthetic construct; identical to SEQ ID NO: 43444
  source 1..80: mol_type = other DNA

SEQ ID NO: 77135 - DNA, 80 bp, synthetic construct; identical to SEQ ID NO: 14734
  source 1..80: mol_type = other DNA

SEQ ID NO: 77136 - DNA, 80 bp, synthetic construct; identical to SEQ ID NO: 43446
  source 1..80: mol_type = other DNA

SEQ ID NO: 77137 - DNA, 80 bp, synthetic construct; identical to SEQ ID NO: 43447
  source 1..80: mol_type = other DNA

SEQ ID NO: 77138 - DNA, 80 bp, synthetic construct; identical to SEQ ID NO: 43449
  source 1..80: mol_type = other DNA

SEQ ID NO: 77139 - DNA, 80 bp, synthetic construct; identical to SEQ ID NO: 14735
  source 1..80: mol_type = other DNA

SEQ ID NO: 77140 - DNA, 80 bp, synthetic construct; identical to SEQ ID NO: 43451
  source 1..80: mol_type = other DNA

SEQ ID NO: 77141 - DNA, 80 bp, synthetic construct; identical to SEQ ID NO: 43452
  source 1..80: mol_type = other DNA

SEQ ID NO: 77142 - DNA, 80 bp, synthetic construct; identical to SEQ ID NO: 43453
  source 1..80: mol_type = other DNA

SEQ ID NO: 77143 - DNA, 80 bp, synthetic construct; identical to SEQ ID NO: 14736
  source 1..80: mol_type = other DNA

SEQ ID NO: 77144 - DNA, 80 bp, synthetic construct; identical to SEQ ID NO: 43455
  source 1..80: mol_type = other DNA

SEQ ID NO: 77145 - DNA, 80 bp, synthetic construct; identical to SEQ ID NO: 43456
  source 1..80: mol_type = other DNA

SEQ ID NO: 77146 - DNA, 80 bp, synthetic construct; identical to SEQ ID NO: 14737
  source 1..80: mol_type = other DNA

SEQ ID NO: 77147 - DNA, 80 bp, synthetic construct; identical to SEQ ID NO: 43459
  source 1..80: mol_type = other DNA

SEQ ID NO: 77148 - DNA, 80 bp, synthetic construct; identical to SEQ ID NO: 43460
  source 1..80: mol_type = other DNA

SEQ ID NO: 77149 - DNA, 80 bp, synthetic construct; identical to SEQ ID NO: 14738
  source 1..80: mol_type = other DNA

SEQ ID NO: 77150 - DNA, 80 bp, synthetic construct; identical to SEQ ID NO: 43462
  source 1..80: mol_type = other DNA

SEQ ID NO: 77151 - DNA, 80 bp, synthetic construct; identical to SEQ ID NO: 43463
  source 1..80: mol_type = other DNA

SEQ ID NO: 77152 - DNA, 80 bp, synthetic construct; identical to SEQ ID NO: 43464
  source 1..80: mol_type = other DNA

SEQ ID NO: 77153 - DNA, 80 bp, synthetic construct; identical to SEQ ID NO: 43465
  source 1..80: mol_type = other DNA

SEQ ID NO: 77154 - DNA, 80 bp, synthetic construct; identical to SEQ ID NO: 14739
  source 1..80: mol_type = other DNA

SEQ ID NO: 77155 - DNA, 80 bp, synthetic construct; identical to SEQ ID NO: 43467
  source 1..80: mol_type = other DNA

SEQ ID NO: 77156 - DNA, 80 bp, synthetic construct; identical to SEQ ID NO: 43468
  source 1..80: mol_type = other DNA

SEQ ID NO: 77157 - DNA, 80 bp, synthetic construct; identical to SEQ ID NO: 43469
  source 1..80: mol_type = other DNA

SEQ ID NO: 77158 - DNA, 80 bp, synthetic construct; identical to SEQ ID NO: 14740
  source 1..80: mol_type = other DNA

SEQ ID NO: 77159 - DNA, 80 bp, synthetic construct; identical to SEQ ID NO: 43471
  source 1..80: mol_type = other DNA

SEQ ID NO: 77160 - DNA, 80 bp, synthetic construct; identical to SEQ ID NO: 43472
  source 1..80: mol_type = other DNA

SEQ ID NO: 77161 - DNA, 80 bp, synthetic construct; identical to SEQ ID NO: 14741
  source 1..80: mol_type = other DNA

SEQ ID NO: 77162 - DNA, 80 bp, synthetic construct; identical to SEQ ID NO: 43474
  source 1..80: mol_type = other DNA

SEQ ID NO: 77163 - DNA, 80 bp, synthetic construct; identical to SEQ ID NO: 43475
  source 1..80: mol_type = other DNA

SEQ ID NO: 77164 - DNA, 80 bp, synthetic construct; identical to SEQ ID NO: 43476
  source 1..80: mol_type = other DNA

SEQ ID NO: 77165 - DNA, 80 bp, synthetic construct; identical to SEQ ID NO: 43477
  source 1..80: mol_type = other DNA

SEQ ID NO: 77166 - DNA, 80 bp, synthetic construct; identical to SEQ ID NO: 14742
  source 1..80: mol_type = other DNA

SEQ ID NO: 77167 - DNA, 80 bp, synthetic construct; identical to SEQ ID NO: 43479
  source 1..80: mol_type = other DNA

SEQ ID NO: 77168 - DNA, 80 bp, synthetic construct; identical to SEQ ID NO: 14743
  source 1..80: mol_type = other DNA

SEQ ID NO: 77169 - DNA, 80 bp, synthetic construct; identical to SEQ ID NO: 43481
  source 1..80: mol_type = other DNA

SEQ ID NO: 77170 - DNA, 80 bp, synthetic construct; identical to SEQ ID NO: 43482
  source 1..80: mol_type = other DNA

SEQ ID NO: 77171 - DNA, 80 bp, synthetic construct; identical to SEQ ID NO: 14744
  source 1..80: mol_type = other DNA

SEQ ID NO: 77172 - DNA, 80 bp, synthetic construct; identical to SEQ ID NO: 43485
  source 1..80: mol_type = other DNA

SEQ ID NO: 77173 - DNA, 80 bp, synthetic construct; identical to SEQ ID NO: 43486
  source 1..80: mol_type = other DNA

SEQ ID NO: 77174 - DNA, 80 bp, synthetic construct; identical to SEQ ID NO: 43487
  source 1..80: mol_type = other DNA

SEQ ID NO: 77175 - DNA, 80 bp, synthetic construct; identical to SEQ ID NO: 14745
  source 1..80: mol_type = other DNA

SEQ ID NO: 77176 - DNA, 80 bp, synthetic construct; identical to SEQ ID NO: 43489
  source 1..80: mol_type = other DNA

SEQ ID NO: 77177 - DNA, 80 bp, synthetic construct; identical to SEQ ID NO: 43490
  source 1..80: mol_type = other DNA

SEQ ID NO: 77178 - DNA, 80 bp, synthetic construct; identical to SEQ ID NO: 43491
  source 1..80: mol_type = other DNA

SEQ ID NO: 77179 - DNA, 80 bp, synthetic construct; identical to SEQ ID NO: 14746
  source 1..80: mol_type = other DNA

SEQ ID NO: 77180 - DNA, 80 bp, synthetic construct; identical to SEQ ID NO: 43493
  source 1..80: mol_type = other DNA

SEQ ID NO: 77181 - DNA, 80 bp, synthetic construct; identical to SEQ ID NO: 43494
  source 1..80: mol_type = other DNA

SEQ ID NO: 77182 - DNA, 80 bp, synthetic construct; identical to SEQ ID NO: 43495
  source 1..80: mol_type = other DNA

SEQ ID NO: 77183 - DNA, 80 bp, synthetic construct; identical to SEQ ID NO: 14747
  source 1..80: mol_type = other DNA

SEQ ID NO: 77184 - DNA, 80 bp, synthetic construct; identical to SEQ ID NO: 43497
  source 1..80: mol_type = other DNA

SEQ ID NO: 77185 - DNA, 80 bp, synthetic construct; identical to SEQ ID NO: 43498
  source 1..80: mol_type = other DNA

SEQ ID NO: 77186 - DNA, 80 bp, synthetic construct; identical to SEQ ID NO: 43499
  source 1..80: mol_type = other DNA

SEQ ID NO: 77187 - DNA, 80 bp, synthetic construct; identical to SEQ ID NO: 43500
  source 1..80: mol_type = other DNA

SEQ ID NO: 77188 - DNA, 80 bp, synthetic construct; identical to SEQ ID NO: 14748
  source 1..80: mol_type = other DNA

SEQ ID NO: 77189 - DNA, 80 bp, synthetic construct; identical to SEQ ID NO: 43502
  source 1..80: mol_type = other DNA

SEQ ID NO: 77190 - DNA, 80 bp, synthetic construct; identical to SEQ ID NO: 43503
  source 1..80: mol_type = other DNA

SEQ ID NO: 77191 - DNA, 80 bp, synthetic construct; identical to SEQ ID NO: 43504
  source 1..80: mol_type = other DNA

SEQ ID NO: 77192 - DNA, 80 bp, synthetic construct; identical to SEQ ID NO: 14749
  source 1..80: mol_type = other DNA

SEQ ID NO: 77193 - DNA, 80 bp, synthetic construct; identical to SEQ ID NO: 43506
  source 1..80: mol_type = other DNA

SEQ ID NO: 77194 - DNA, 80 bp, synthetic construct; identical to SEQ ID NO: 43507
  source 1..80: mol_type = other DNA

SEQ ID NO: 77195 - DNA, 80 bp, synthetic construct; identical to SEQ ID NO: 43508
  source 1..80: mol_type = other DNA

SEQ ID NO: 77196 - DNA, 80 bp, synthetic construct; identical to SEQ ID NO: 14750
  source 1..80: mol_type = other DNA

SEQ ID NO: 77197 - DNA, 80 bp, synthetic construct; identical to SEQ ID NO: 43510
  source 1..80: mol_type = other DNA

SEQ ID NO: 77198 - DNA, 80 bp, synthetic construct; identical to SEQ ID NO: 43511
  source 1..80: mol_type = other DNA

SEQ ID NO: 77199 - DNA, 80 bp, synthetic construct; identical to SEQ ID NO: 43512
  source 1..80: mol_type = other DNA

SEQ ID NO: 77200 - DNA, 80 bp, synthetic construct; identical to SEQ ID NO: 14751
  source 1..80: mol_type = other DNA

SEQ ID NO: 77201 - DNA, 80 bp, synthetic construct; identical to SEQ ID NO: 43514
  source 1..80: mol_type = other DNA

SEQ ID NO: 77202 - DNA, 80 bp, synthetic construct; identical to SEQ ID NO: 43515
  source 1..80: mol_type = other DNA

SEQ ID NO: 77203 - DNA, 80 bp, synthetic construct; identical to SEQ ID NO: 43516
  source 1..80: mol_type = other DNA

SEQ ID NO: 77204 - DNA, 80 bp, synthetic construct; identical to SEQ ID NO: 14752
  source 1..80: mol_type = other DNA

SEQ ID NO: 77205 - DNA, 80 bp, synthetic construct; identical to SEQ ID NO: 43518
  source 1..80: mol_type = other DNA

SEQ ID NO: 77206 - DNA, 80 bp, synthetic construct; identical to SEQ ID NO: 43519
  source 1..80: mol_type = other DNA

SEQ ID NO: 77207 - DNA, 80 bp, synthetic construct; identical to SEQ ID NO: 43520
  source 1..80: mol_type = other DNA

SEQ ID NO: 77208 - DNA, 80 bp, synthetic construct; identical to SEQ ID NO: 14753
  source 1..80: mol_type = other DNA

SEQ ID NO: 77209 - DNA, 80 bp, synthetic construct; identical to SEQ ID NO: 43522
  source 1..80: mol_type = other DNA

SEQ ID NO: 77210 - DNA, 80 bp, synthetic construct; identical to SEQ ID NO: 43523
  source 1..80: mol_type = other DNA

SEQ ID NO: 77211 - DNA, 80 bp, synthetic construct; identical to SEQ ID NO: 14754
  source 1..80: mol_type = other DNA

SEQ ID NO: 77212 - DNA, 80 bp, synthetic construct; identical to SEQ ID NO: 43526
  source 1..80: mol_type = other DNA

SEQ ID NO: 77213 - DNA, 80 bp, synthetic construct; identical to SEQ ID NO: 43527
  source 1..80: mol_type = other DNA

SEQ ID NO: 77214 - DNA, 80 bp, synthetic construct; identical to SEQ ID NO: 14755
  source 1..80: mol_type = other DNA

SEQ ID NO: 77215 - DNA, 80 bp, synthetic construct; identical to SEQ ID NO: 43529
  source 1..80: mol_type = other DNA

SEQ ID NO: 77216 - DNA, 80 bp, synthetic construct; identical to SEQ ID NO: 43530
  source 1..80: mol_type = other DNA

SEQ ID NO: 77217 - DNA, 80 bp, synthetic construct; identical to SEQ ID NO: 43531
  source 1..80: mol_type = other DNA

SEQ ID NO: 77218 - DNA, 80 bp, synthetic construct; identical to SEQ ID NO: 43532
  source 1..80: mol_type = other DNA

SEQ ID NO: 77219 - DNA, 80 bp, synthetic construct; identical to SEQ ID NO: 14756
  source 1..80: mol_type = other DNA

SEQ ID NO: 77220 - DNA, 80 bp, synthetic construct; identical to SEQ ID NO: 43534
  source 1..80: mol_type = other DNA

SEQ ID NO: 77221 - DNA, 80 bp, synthetic construct; identical to SEQ ID NO: 43535
  source 1..80: mol_type = other DNA

SEQ ID NO: 77222 - DNA, 80 bp, synthetic construct; identical to SEQ ID NO: 43536
  source 1..80: mol_type = other DNA

SEQ ID NO: 77223 - DNA, 80 bp, synthetic construct; identical to SEQ ID NO: 14757
  source 1..80: mol_type = other DNA

SEQ ID NO: 77224 - DNA, 80 bp, synthetic construct; identical to SEQ ID NO: 43538
  source 1..80: mol_type = other DNA

SEQ ID NO: 77225 - DNA, 80 bp, synthetic construct; identical to SEQ ID NO: 43539
  source 1..80: mol_type = other DNA

SEQ ID NO: 77226 - DNA, 80 bp, synthetic construct; identical to SEQ ID NO: 43540
  source 1..80: mol_type = other DNA

SEQ ID NO: 77227 - DNA, 80 bp, synthetic construct; identical to SEQ ID NO: 14758
  source 1..80: mol_type = other DNA

SEQ ID NO: 77228 - DNA, 80 bp, synthetic construct; identical to SEQ ID NO: 43542
  source 1..80: mol_type = other DNA

SEQ ID NO: 77229 - DNA, 80 bp, synthetic construct; identical to SEQ ID NO: 43543
  source 1..80: mol_type = other DNA

SEQ ID NO: 77230 - DNA, 80 bp, synthetic construct; identical to SEQ ID NO: 43544
  source 1..80: mol_type = other DNA

SEQ ID NO: 77231 - DNA, 80 bp, synthetic construct; identical to SEQ ID NO: 14759
  source 1..80: mol_type = other DNA

SEQ ID NO: 77232 - DNA, 80 bp, synthetic construct; identical to SEQ ID NO: 43546
  source 1..80: mol_type = other DNA

SEQ ID NO: 77233 - DNA, 80 bp, synthetic construct; identical to SEQ ID NO: 43547
  source 1..80: mol_type = other DNA

SEQ ID NO: 77234 - DNA, 80 bp, synthetic construct; identical to SEQ ID NO: 43548
  source 1..80: mol_type = other DNA

SEQ ID NO: 77235 - DNA, 80 bp, synthetic construct; identical to SEQ ID NO: 14760
  source 1..80: mol_type = other DNA

SEQ ID NO: 77236 - DNA, 80 bp, synthetic construct; identical to SEQ ID NO: 43550
  source 1..80: mol_type = other DNA

SEQ ID NO: 77237 - DNA, 80 bp, synthetic construct; identical to SEQ ID NO: 43551
  source 1..80: mol_type = other DNA

SEQ ID NO: 77238 - DNA, 80 bp, synthetic construct; identical to SEQ ID NO: 43552
  source 1..80: mol_type = other DNA

SEQ ID NO: 77239 - DNA, 80 bp, synthetic construct; identical to SEQ ID NO: 14761
  source 1..80: mol_type = other DNA

SEQ ID NO: 77240 - DNA, 80 bp, synthetic construct; identical to SEQ ID NO: 43555
  source 1..80: mol_type = other DNA

SEQ ID NO: 77241 - DNA, 80 bp, synthetic construct; identical to SEQ ID NO: 43556
  source 1..80: mol_type = other DNA

SEQ ID NO: 77242 - DNA, 80 bp, synthetic construct; identical to SEQ ID NO: 14762
  source 1..80: mol_type = other DNA

SEQ ID NO: 77243 - DNA, 80 bp, synthetic construct; identical to SEQ ID NO: 43558
  source 1..80: mol_type = other DNA

SEQ ID NO: 77244 - DNA, 80 bp, synthetic construct; identical to SEQ ID NO: 43559
  source 1..80: mol_type = other DNA

SEQ ID NO: 77245 - DNA, 80 bp, synthetic construct; identical to SEQ ID NO: 43560
  source 1..80: mol_type = other DNA

SEQ ID NO: 77246 - DNA, 80 bp, synthetic construct; identical to SEQ ID NO: 14763
  source 1..80: mol_type = other DNA

SEQ ID NO: 77247 - DNA, 80 bp, synthetic construct; identical to SEQ ID NO: 43562
  source 1..80: mol_type = other DNA

SEQ ID NO: 77248 - DNA, 80 bp, synthetic construct; identical to SEQ ID NO: 43563
  source 1..80: mol_type = other DNA

SEQ ID NO: 77249 - DNA, 80 bp, synthetic construct; identical to SEQ ID NO: 43564
  source 1..80: mol_type = other DNA

SEQ ID NO: 77250 - DNA, 80 bp, synthetic construct; identical to SEQ ID NO: 43565
  source 1..80: mol_type = other DNA

SEQ ID NO: 77251 - DNA, 80 bp, synthetic construct; identical to SEQ ID NO: 14764
  source 1..80: mol_type = other DNA

SEQ ID NO: 77252 - DNA, 80 bp, synthetic construct; identical to SEQ ID NO: 43567
  source 1..80: mol_type = other DNA

SEQ ID NO: 77253 - DNA, 80 bp, synthetic construct; identical to SEQ ID NO: 43568
  source 1..80: mol_type = other DNA

SEQ ID NO: 77254 - DNA, 80 bp, synthetic construct; identical to SEQ ID NO: 14765
  source 1..80: mol_type = other DNA

SEQ ID NO: 77255 - DNA, 80 bp, synthetic construct; identical to SEQ ID NO: 43570
  source 1..80: mol_type = other DNA

SEQ ID NO: 77256 - DNA, 80 bp, synthetic construct; identical to SEQ ID NO: 43571
  source 1..80: mol_type = other DNA

SEQ ID NO: 77257 - DNA, 80 bp, synthetic construct; identical to SEQ ID NO: 43572
  source 1..80: mol_type = other DNA

SEQ ID NO: 77258 - DNA, 80 bp, synthetic construct; identical to SEQ ID NO: 14766
  source 1..80: mol_type = other DNA

SEQ ID NO: 77259 - DNA, 80 bp, synthetic construct; identical to SEQ ID NO: 43574
  source 1..80: mol_type = other DNA

SEQ ID NO: 77260 - DNA, 80 bp, synthetic construct; identical to SEQ ID NO: 43575
  source 1..80: mol_type = other DNA

SEQ ID NO: 77261 - DNA, 80 bp, synthetic construct; identical to SEQ ID NO: 43576
  source 1..80: mol_type = other DNA

SEQ ID NO: 77262 - DNA, 80 bp, synthetic construct; identical to SEQ ID NO: 43577
  source 1..80: mol_type = other DNA

SEQ ID NO: 77263 - DNA, 80 bp, synthetic construct; identical to SEQ ID NO: 14767
  source 1..80: mol_type = other DNA

SEQ ID NO: 77264 - DNA, 80 bp, synthetic construct; identical to SEQ ID NO: 43579
  source 1..80: mol_type = other DNA

SEQ ID NO: 77265 - DNA, 80 bp, synthetic construct; identical to SEQ ID NO: 43580
  source 1..80: mol_type = other DNA

SEQ ID NO: 77266 - DNA, 80 bp, synthetic construct; identical to SEQ ID NO: 14768
  source 1..80: mol_type = other DNA

SEQ ID NO: 77267 - DNA, 80 bp, synthetic construct; identical to SEQ ID NO: 43583
  source 1..80: mol_type = other DNA

SEQ ID NO: 77268 - DNA, 80 bp, synthetic construct; identical to SEQ ID NO: 43584
  source 1..80: mol_type = other DNA

SEQ ID NO: 77269 - DNA, 80 bp, synthetic construct; identical to SEQ ID NO: 14769
  source 1..80: mol_type = other DNA

SEQ ID NO: 77270 - DNA, 80 bp, synthetic construct; identical to SEQ ID NO: 43586
  source 1..80: mol_type = other DNA

SEQ ID NO: 77271 - DNA, 80 bp, synthetic construct; identical to SEQ ID NO: 43587
  source 1..80: mol_type = other DNA

SEQ ID NO: 77272 - DNA, 80 bp, synthetic construct; identical to SEQ ID NO: 43588
  source 1..80: mol_type = other DNA

SEQ ID NO: 77273 - DNA, 80 bp, synthetic construct; identical to SEQ ID NO: 14770
  source 1..80: mol_type = other DNA

SEQ ID NO: 77274 - DNA, 80 bp, synthetic construct; identical to SEQ ID NO: 43590
  source 1..80: mol_type = other DNA

SEQ ID NO: 77275 - DNA, 80 bp, synthetic construct; identical to SEQ ID NO: 43591
  source 1..80: mol_type = other DNA

SEQ ID NO: 77276 - DNA, 80 bp, synthetic construct; identical to SEQ ID NO: 43592
  source 1..80: mol_type = other DNA

SEQ ID NO: 77277 - DNA, 80 bp, synthetic construct; identical to SEQ ID NO: 43593
  source 1..80: mol_type = other DNA

SEQ ID NO: 77278 - DNA, 80 bp, synthetic construct; identical to SEQ ID NO: 14771
  source 1..80: mol_type = other DNA

SEQ ID NO: 77279 - DNA, 80 bp, synthetic construct; identical to SEQ ID NO: 43595
  source 1..80: mol_type = other DNA

SEQ ID NO: 77280 - DNA, 80 bp, synthetic construct; identical to SEQ ID NO: 43596
  source 1..80: mol_type = other DNA

SEQ ID NO: 77281 - DNA, 80 bp, synthetic construct; identical to SEQ ID NO: 14772
  source 1..80: mol_type = other DNA

SEQ ID NO: 77282 - DNA, 80 bp, synthetic construct; identical to SEQ ID NO: 43598
  source 1..80: mol_type = other DNA

SEQ ID NO: 77283 - DNA, 80 bp, synthetic construct; identical to SEQ ID NO: 43599
  source 1..80: mol_type = other DNA

SEQ ID NO: 77284 - DNA, 80 bp, synthetic construct; identical to SEQ ID NO: 43600
  source 1..80: mol_type = other DNA

SEQ ID NO: 77285 - DNA, 80 bp, synthetic construct; identical to SEQ ID NO: 14773
  source 1..80: mol_type = other DNA

SEQ ID NO: 77286 - DNA, 80 bp, synthetic construct; identical to SEQ ID NO: 43602
  source 1..80: mol_type = other DNA

SEQ ID NO: 77287 - DNA, 80 bp, synthetic construct; identical to SEQ ID NO: 43603
  source 1..80: mol_type = other DNA

SEQ ID NO: 77288 - DNA, 80 bp, synthetic construct; identical to SEQ ID NO: 43604
  source 1..80: mol_type = other DNA

SEQ ID NO: 77289 - DNA, 80 bp, synthetic construct; identical to SEQ ID NO: 14774
  source 1..80: mol_type = other DNA

SEQ ID NO: 77290 - DNA, 80 bp, synthetic construct; identical to SEQ ID NO: 43606
  source 1..80: mol_type = other DNA

SEQ ID NO: 77291 - DNA, 80 bp, synthetic construct; identical to SEQ ID NO: 43607
  source 1..80: mol_type = other DNA

SEQ ID NO: 77292 - DNA, 80 bp, synthetic construct; identical to SEQ ID NO: 43608
  source 1..80: mol_type = other DNA

SEQ ID NO: 77293 - DNA, 80 bp, synthetic construct; identical to SEQ ID NO: 14775
  source 1..80: mol_type = other DNA

SEQ ID NO: 77294 - DNA, 80 bp, synthetic construct; identical to SEQ ID NO: 43610
  source 1..80: mol_type = other DNA

SEQ ID NO: 77295 - DNA, 80 bp, synthetic construct; identical to SEQ ID NO: 43611
  source 1..80: mol_type = other DNA

SEQ ID NO: 77296 - DNA, 80 bp, synthetic construct; identical to SEQ ID NO: 43612
  source 1..80: mol_type = other DNA

SEQ ID NO: 77297 - DNA, 80 bp, synthetic construct; identical to SEQ ID NO: 14776
  source 1..80: mol_type = other DNA

SEQ ID NO: 77298 - DNA, 80 bp, synthetic construct; identical to SEQ ID NO: 43615
  source 1..80: mol_type = other DNA

SEQ ID NO: 77299 - DNA, 80 bp, synthetic construct; identical to SEQ ID NO: 43616
  source 1..80: mol_type = other DNA

SEQ ID NO: 77300 - DNA, 80 bp, synthetic construct; identical to SEQ ID NO: 43617
  source 1..80: mol_type = other DNA

SEQ ID NO: 77301 - DNA, 80 bp, synthetic construct; identical to SEQ ID NO: 14777
  source 1..80: mol_type = other DNA

SEQ ID NO: 77302 - DNA, 80 bp, synthetic construct; identical to SEQ ID NO: 43619
  source 1..80: mol_type = other DNA

SEQ ID NO: 77303 - DNA, 80 bp, synthetic construct; identical to SEQ ID NO: 43620
  source 1..80: mol_type = other DNA

SEQ ID NO: 77304 - DNA, 80 bp, synthetic construct; identical to SEQ ID NO: 14778
  source 1..80: mol_type = other DNA

SEQ ID NO: 77305 - DNA, 80 bp, synthetic construct; identical to SEQ ID NO: 43622
  source 1..80: mol_type = other DNA

SEQ ID NO: 77306 - DNA, 80 bp, synthetic construct; identical to SEQ ID NO: 43623
  source 1..80: mol_type = other DNA

SEQ ID NO: 77307 - DNA, 80 bp, synthetic construct; identical to SEQ ID NO: 43624
  source 1..80: mol_type = other DNA

SEQ ID NO: 77308 - DNA, 80 bp, synthetic construct; identical to SEQ ID NO: 43625
  source 1..80: mol_type = other DNA

SEQ ID NO: 77309 - DNA, 80 bp, synthetic construct; identical to SEQ ID NO: 14779
  source 1..80: mol_type = other DNA

SEQ ID NO: 77310 - DNA, 80 bp, synthetic construct; identical to SEQ ID NO: 43628
  source 1..80: mol_type = other DNA

SEQ ID NO: 77311 - DNA, 80 bp, synthetic construct; identical to SEQ ID NO: 14780
  source 1..80: mol_type = other DNA

SEQ ID NO: 77312 - DNA, 80 bp, synthetic construct; identical to SEQ ID NO: 43630
  source 1..80: mol_type = other DNA

SEQ ID NO: 77313 - DNA, 80 bp, synthetic construct; identical to SEQ ID NO: 43631
  source 1..80: mol_type = other DNA

SEQ ID NO: 77314 - DNA, 80 bp, synthetic construct; identical to SEQ ID NO: 43632
  source 1..80: mol_type = other DNA

SEQ ID NO: 77315 - DNA, 80 bp, synthetic construct; identical to SEQ ID NO: 14781
  source 1..80: mol_type = other DNA

SEQ ID NO: 77316 - DNA, 80 bp, synthetic construct; identical to SEQ ID NO: 43634
  source 1..80: mol_type = other DNA

SEQ ID NO: 77317 - DNA, 80 bp, synthetic construct; identical to SEQ ID NO: 43635
  source 1..80: mol_type = other DNA

SEQ ID NO: 77318 - DNA, 80 bp, synthetic construct; identical to SEQ ID NO: 43636
  source 1..80: mol_type = other DNA

SEQ ID NO: 77319 - DNA, 80 bp, synthetic construct; identical to SEQ ID NO: 14782
  source 1..80: mol_type = other DNA

SEQ ID NO: 77320 - DNA, 80 bp, synthetic construct; identical to SEQ ID NO: 43638
  source 1..80: mol_type = other DNA

SEQ ID NO: 77321 - DNA, 80 bp, synthetic construct; identical to SEQ ID NO: 43639
  source 1..80: mol_type = other DNA

SEQ ID NO: 77322 - DNA, 80 bp, synthetic construct; identical to SEQ ID NO: 43640
  source 1..80: mol_type = other DNA

SEQ ID NO: 77323 - DNA, 80 bp, synthetic construct; identical to SEQ ID NO: 43641
  source 1..80: mol_type = other DNA

SEQ ID NO: 77324 - DNA, 80 bp, synthetic construct; identical to SEQ ID NO: 43642
  source 1..80: mol_type = other DNA

SEQ ID NO: 77325 - DNA, 80 bp, synthetic construct; identical to SEQ ID NO: 14783
  source 1..80: mol_type = other DNA

SEQ ID NO: 77326 - DNA, 80 bp, synthetic construct; identical to SEQ ID NO: 43644
  source 1..80: mol_type = other DNA

SEQ ID NO: 77327 - DNA, 80 bp, synthetic construct; identical to SEQ ID NO: 14784
  source 1..80: mol_type = other DNA

SEQ ID NO: 77328 - DNA, 80 bp, synthetic construct; identical to SEQ ID NO: 43646
  source 1..80: mol_type = other DNA

SEQ ID NO: 77329 - DNA, 80 bp, synthetic construct; identical to SEQ ID NO: 43647
  source 1..80: mol_type = other DNA

SEQ ID NO: 77330 - DNA, 80 bp, synthetic construct; identical to SEQ ID NO: 43649
  source 1..80: mol_type = other DNA

SEQ ID NO: 77331 - DNA, 80 bp, synthetic construct; identical to SEQ ID NO: 14785
  source 1..80: mol_type = other DNA

SEQ ID NO: 77332 - DNA, 80 bp, synthetic construct; identical to SEQ ID NO: 43651
  source 1..80: mol_type = other DNA

SEQ ID NO: 77333 - DNA, 80 bp, synthetic construct; identical to SEQ ID NO: 43652
  source 1..80: mol_type = other DNA

SEQ ID NO: 77334 - DNA, 80 bp, synthetic construct; identical to SEQ ID NO: 43653
  source 1..80: mol_type = other DNA

SEQ ID NO: 77335 - DNA, 80 bp, synthetic construct; identical to SEQ ID NO: 14786
  source 1..80: mol_type = other DNA

SEQ ID NO: 77336 - DNA, 80 bp, synthetic construct; identical to SEQ ID NO: 43655
  source 1..80: mol_type = other DNA

SEQ ID NO: 77337 - DNA, 80 bp, synthetic construct; identical to SEQ ID NO: 43657
  source 1..80: mol_type = other DNA

SEQ ID NO: 77338 - DNA, 80 bp, synthetic construct; identical to SEQ ID NO: 14787
  source 1..80: mol_type = other DNA

SEQ ID NO: 77339 - DNA, 80 bp, synthetic construct; identical to SEQ ID NO: 43661
  source 1..80: mol_type = other DNA

SEQ ID NO: 77340 - DNA, 80 bp, synthetic construct; identical to SEQ ID NO: 14788
  source 1..80: mol_type = other DNA

SEQ ID NO: 77341 - DNA, 80 bp, synthetic construct; identical to SEQ ID NO: 43663
  source 1..80: mol_type = other DNA

SEQ ID NO: 77342 - DNA, 80 bp, synthetic construct; identical to SEQ ID NO: 43664
  source 1..80: mol_type = other DNA

SEQ ID NO: 77343 - DNA, 80 bp, synthetic construct; identical to SEQ ID NO: 43665
  source 1..80: mol_type = other DNA

SEQ ID NO: 77344 - DNA, 80 bp, synthetic construct; identical to SEQ ID NO: 14789
  source 1..80: mol_type = other DNA

SEQ ID NO: 77345 - DNA, 80 bp, synthetic construct; identical to SEQ ID NO: 43667
  source 1..80: mol_type = other DNA

SEQ ID NO: 77346 - DNA, 80 bp, synthetic construct; identical to SEQ ID NO: 43668
  source 1..80: mol_type = other DNA

SEQ ID NO: 77347 - DNA, 80 bp, synthetic construct; identical to SEQ ID NO: 14790
  source 1..80: mol_type = other DNA

SEQ ID NO: 77348 - DNA, 80 bp, synthetic construct; identical to SEQ ID NO: 43670
  source 1..80: mol_type = other DNA

SEQ ID NO: 77349 - DNA, 80 bp, synthetic construct; identical to SEQ ID NO: 43671
  source 1..80: mol_type = other DNA

SEQ ID NO: 77350 - DNA, 80 bp, synthetic construct; identical to SEQ ID NO: 43672
  source 1..80: mol_type = other DNA

SEQ ID NO: 77351 - DNA, 80 bp, synthetic construct; identical to SEQ ID NO: 43673
  source 1..80: mol_type = other DNA

SEQ ID NO: 77352 - DNA, 80 bp, synthetic construct; identical to SEQ ID NO: 14791
  source 1..80: mol_type = other DNA

SEQ ID NO: 77353 - DNA, 80 bp, synthetic construct; identical to SEQ ID NO: 43675
  source 1..80: mol_type = other DNA

SEQ ID NO: 77354 - DNA, 80 bp, synthetic construct; identical to SEQ ID NO: 43676
  source 1..80: mol_type = other DNA

SEQ ID NO: 77355 - DNA, 80 bp, synthetic construct; identical to SEQ ID NO: 43677
  source 1..80: mol_type = other DNA

SEQ ID NO: 77356 - DNA, 80 bp, synthetic construct; identical to SEQ ID NO: 14792
  source 1..80: mol_type = other DNA

SEQ ID NO: 77357 - DNA, 80 bp, synthetic construct; identical to SEQ ID NO: 43679
  source 1..80: mol_type = other DNA

SEQ ID NO: 77358 - DNA, 80 bp, synthetic construct; identical to SEQ ID NO: 43680
  source 1..80: mol_type = other DNA

SEQ ID NO: 77359 - DNA, 80 bp, synthetic construct; identical to SEQ ID NO: 14793
  source 1..80: mol_type = other DNA

SEQ ID NO: 77360 - DNA, 80 bp, synthetic construct; identical to SEQ ID NO: 43682
  source 1..80: mol_type = other DNA

SEQ ID NO: 77361 - DNA, 80 bp, synthetic construct; identical to SEQ ID NO: 43683
  source 1..80: mol_type = other DNA

SEQ ID NO: 77362 - DNA, 80 bp, synthetic construct; identical to SEQ ID NO: 43684
  source 1..80: mol_type = other DNA

SEQ ID NO: 77363 - DNA, 80 bp, synthetic construct; identical to SEQ ID NO: 14794
  source 1..80: mol_type = other DNA

SEQ ID NO: 77364 - DNA, 80 bp, synthetic construct; identical to SEQ ID NO: 43686
  source 1..80: mol_type = other DNA

SEQ ID NO: 77365 - DNA, 80 bp, synthetic construct; identical to SEQ ID NO: 43687
  source 1..80: mol_type = other DNA

SEQ ID NO: 77366 - DNA, 80 bp, synthetic construct; identical to SEQ ID NO: 43688
  source 1..80: mol_type = other DNA

SEQ ID NO: 77367 - DNA, 80 bp, synthetic construct; identical to SEQ ID NO: 14795
  source 1..80: mol_type = other DNA

SEQ ID NO: 77368 - DNA, 80 bp, synthetic construct; identical to SEQ ID NO: 43690
  source 1..80: mol_type = other DNA

SEQ ID NO: 77369 - DNA, 80 bp, synthetic construct; identical to SEQ ID NO: 43691
  source 1..80: mol_type = other DNA

SEQ ID NO: 77370 - DNA, 80 bp, synthetic construct; identical to SEQ ID NO: 43692
  source 1..80: mol_type = other DNA

SEQ ID NO: 77371 - DNA, 80 bp, synthetic construct; identical to SEQ ID NO: 14796
  source 1..80: mol_type = other DNA

SEQ ID NO: 77372 - DNA, 80 bp, synthetic construct; identical to SEQ ID NO: 43695
  source 1..80: mol_type = other DNA

SEQ ID NO: 77373 - DNA, 80 bp, synthetic construct; identical to SEQ ID NO: 43697
  source 1..80: mol_type = other DNA

SEQ ID NO: 77374 - DNA, 80 bp, synthetic construct; identical to SEQ ID NO: 14797
  source 1..80: mol_type = other DNA

SEQ ID NO: 77375 - DNA, 80 bp, synthetic construct; identical to SEQ ID NO: 43699
  source 1..80: mol_type = other DNA

SEQ ID NO: 77376 - DNA, 80 bp, synthetic construct; identical to SEQ ID NO: 43700
  source 1..80: mol_type = other DNA

SEQ ID NO: 77377 - DNA, 80 bp, synthetic construct; identical to SEQ ID NO: 14798
  source 1..80: mol_type = other DNA

SEQ ID NO: 77378 - DNA, 80 bp, synthetic construct; identical to SEQ ID NO: 43702
  source 1..80: mol_type = other DNA

SEQ ID NO: 77379 - DNA, 80 bp, synthetic construct; identical to SEQ ID NO: 43703
  source 1..80: mol_type = other DNA

SEQ ID NO: 77380 - DNA, 80 bp, synthetic construct; identical to SEQ ID NO: 43704
  source 1..80: mol_type = other DNA

SEQ ID NO: 77381 - DNA, 80 bp, synthetic construct; identical to SEQ ID NO: 43705
  source 1..80: mol_type = other DNA

SEQ ID NO: 77382 - DNA, 80 bp, synthetic construct; identical to SEQ ID NO: 14799
  source 1..80: mol_type = other DNA

SEQ ID NO: 77383 - DNA, 80 bp, synthetic construct; identical to SEQ ID NO: 43707
  source 1..80: mol_type = other DNA

SEQ ID NO: 77384 - DNA, 80 bp, synthetic construct; identical to SEQ ID NO: 43708
  source 1..80: mol_type = other DNA

SEQ ID NO: 77385 - DNA, 80 bp, synthetic construct; identical to SEQ ID NO: 43709
  source 1..80: mol_type = other DNA

SEQ ID NO: 77386 - DNA, 80 bp, synthetic construct; identical to SEQ ID NO: 43710
  source 1..80: mol_type = other DNA

SEQ ID NO: 77387 - DNA, 80 bp, synthetic construct; identical to SEQ ID NO: 43711
  source 1..80: mol_type = other DNA

SEQ ID NO: 77388 - DNA, 80 bp, synthetic construct; identical to SEQ ID NO: 43712
  source 1..80: mol_type = other DNA

SEQ ID NO: 77389 - DNA, 80 bp, synthetic construct; identical to SEQ ID NO: 14800
  source 1..80: mol_type = other DNA

SEQ ID NO: 77390 - DNA, 80 bp, synthetic construct; identical to SEQ ID NO: 43715
  source 1..80: mol_type = other DNA

SEQ ID NO: 77391 - DNA, 80 bp, synthetic construct; identical to SEQ ID NO: 43716
  source 1..80: mol_type = other DNA

SEQ ID NO: 77392 - DNA, 80 bp, synthetic construct; identical to SEQ ID NO: 43717
  source 1..80: mol_type = other DNA

SEQ ID NO: 77393 - DNA, 80 bp, synthetic construct; identical to SEQ ID NO: 43718
  source 1..80: mol_type = other DNA

SEQ ID NO: 77394 - DNA, 80 bp, synthetic construct; identical to SEQ ID NO: 14801
  source 1..80: mol_type = other DNA

SEQ ID NO: 77395 - DNA, 80 bp, synthetic construct; identical to SEQ ID NO: 43721
  source 1..80: mol_type = other DNA

SEQ ID NO: 77396 - DNA, 80 bp, synthetic construct; identical to SEQ ID NO: 14802
  source 1..80: mol_type = other DNA

SEQ ID NO: 77397 - DNA, 80 bp, synthetic construct; identical to SEQ ID NO: 43723
  source 1..80: mol_type = other DNA

SEQ ID NO: 77398 - DNA, 80 bp, synthetic construct; identical to SEQ ID NO: 43724
  source 1..80: mol_type = other DNA

SEQ ID NO: 77399 - DNA, 80 bp, synthetic construct; identical to SEQ ID NO: 43725
  source 1..80: mol_type = other DNA

SEQ ID NO: 77400 - DNA, 80 bp, synthetic construct; identical to SEQ ID NO: 43726
  source 1..80: mol_type = other DNA

SEQ ID NO: 77401 - DNA, 80 bp, synthetic construct; identical to SEQ ID NO: 14803
  source 1..80: mol_type = other DNA

SEQ ID NO: 77402 - DNA, 80 bp, synthetic construct; identical to SEQ ID NO: 43728
  source 1..80: mol_type = other DNA

SEQ ID NO: 77403 - DNA, 80 bp, synthetic construct; identical to SEQ ID NO: 43729
  source 1..80: mol_type = other DNA

SEQ ID NO: 77404 - DNA, 80 bp, synthetic construct; identical to SEQ ID NO: 14804
  source 1..80: mol_type = other DNA

SEQ ID NO: 77405 - DNA, 80 bp, synthetic construct; identical to SEQ ID NO: 43731
  source 1..80: mol_type = other DNA

SEQ ID NO: 77406 - DNA, 80 bp, synthetic construct; identical to SEQ ID NO: 43732
  source 1..80: mol_type = other DNA

SEQ ID NO: 77407 - DNA, 80 bp, synthetic construct; identical to SEQ ID NO: 43733
  source 1..80: mol_type = other DNA

SEQ ID NO: 77408 - DNA, 80 bp, synthetic construct; identical to SEQ ID NO: 43735
  source 1..80: mol_type = other DNA

SEQ ID NO: 77409 - DNA, 80 bp, synthetic construct; identical to SEQ ID NO: 43736
  source 1..80: mol_type = other DNA

SEQ ID NO: 77410 - DNA, 80 bp, synthetic construct; identical to SEQ ID NO: 43737
  source 1..80: mol_type = other DNA

SEQ ID NO: 77411 - DNA, 80 bp, synthetic construct; identical to SEQ ID NO: 14806
  source 1..80: mol_type = other DNA

SEQ ID NO: 77412 - DNA, 80 bp, synthetic construct; identical to SEQ ID NO: 43739
  source 1..80: mol_type = other DNA

SEQ ID NO: 77413 - DNA, 80 bp, synthetic construct; identical to SEQ ID NO: 43740
  source 1..80: mol_type = other DNA

SEQ ID NO: 77414 - DNA, 80 bp, synthetic construct; identical to SEQ ID NO: 43741
  source 1..80: mol_type = other DNA

SEQ ID NO: 77415 - DNA, 80 bp, synthetic construct; identical to SEQ ID NO: 14807
  source 1..80: mol_type = other DNA

SEQ ID NO: 77416 - DNA, 80 bp, synthetic construct; identical to SEQ ID NO: 43743
  source 1..80: mol_type = other DNA

SEQ ID NO: 77417 - DNA, 80 bp, synthetic construct; identical to SEQ ID NO: 43744
  source 1..80: mol_type = other DNA

SEQ ID NO: 77418 - DNA, 80 bp, synthetic construct; identical to SEQ ID NO: 43745
  source 1..80: mol_type = other DNA

SEQ ID NO: 77419 - DNA, 80 bp, synthetic construct; identical to SEQ ID NO: 14808
  source 1..80: mol_type = other DNA

SEQ ID NO: 77420 - DNA, 80 bp, synthetic construct; identical to SEQ ID NO: 43747
  source 1..80: mol_type = other DNA

SEQ ID NO: 77421 - DNA, 80 bp, synthetic construct; identical to SEQ ID NO: 43748
  source 1..80: mol_type = other DNA

SEQ ID NO: 77422 - DNA, 80 bp, synthetic construct; identical to SEQ ID NO: 43749
  source 1..80: mol_type = other DNA

SEQ ID NO: 77423 - DNA, 80 bp, synthetic construct; identical to SEQ ID NO: 14809
  source 1..80: mol_type = other DNA

SEQ ID NO: 77424 - DNA, 80 bp, synthetic construct; identical to SEQ ID NO: 43751
  source 1..80: mol_type = other DNA

SEQ ID NO: 77425 - DNA, 80 bp, synthetic construct; identical to SEQ ID NO: 43752
  source 1..80: mol_type = other DNA

SEQ ID NO: 77426 - DNA, 80 bp, synthetic construct; identical to SEQ ID NO: 43753
  source 1..80: mol_type = other DNA

SEQ ID NO: 77427 - DNA, 80 bp, synthetic construct; identical to SEQ ID NO: 43754
  source 1..80: mol_type = other DNA

SEQ ID NO: 77428 - DNA, 80 bp, synthetic construct; identical to SEQ ID NO: 14810
  source 1..80: mol_type = other DNA

SEQ ID NO: 77429 - DNA, 80 bp, synthetic construct; identical to SEQ ID NO: 43756
  source 1..80: mol_type = other DNA

SEQ ID NO: 77430 - DNA, 80 bp, synthetic construct; identical to SEQ ID NO: 43757
  source 1..80: mol_type = other DNA

SEQ ID NO: 77431 - DNA, 80 bp, synthetic construct; identical to SEQ ID NO: 14811
  source 1..80: mol_type = other DNA

SEQ ID NO: 77432 - DNA, 80 bp, synthetic construct; identical to SEQ ID NO: 43759
  source 1..80: mol_type = other DNA

SEQ ID NO: 77433 - DNA, 80 bp, synthetic construct; identical to SEQ ID NO: 43760
  source 1..80: mol_type = other DNA

SEQ ID NO: 77434 - DNA, 80 bp, synthetic construct; identical to SEQ ID NO: 43761
  source 1..80: mol_type = other DNA

SEQ ID NO: 77435 - DNA, 80 bp, synthetic construct; identical to SEQ ID NO: 43762
  source 1..80: mol_type = other DNA

SEQ ID NO: 77436 - DNA, 80 bp, synthetic construct; identical to SEQ ID NO: 14812
  source 1..80: mol_type = other DNA

SEQ ID NO: 77437 - DNA, 80 bp, synthetic construct; identical to SEQ ID NO: 43764
  source 1..80: mol_type = other DNA

SEQ ID NO: 77438 - DNA, 80 bp, synthetic construct; identical to SEQ ID NO: 43765
  source 1..80: mol_type = other DNA

SEQ ID NO: 77439 - DNA, 80 bp, synthetic construct; identical to SEQ ID NO: 43766
  source 1..80: mol_type = other DNA

SEQ ID NO: 77440 - DNA, 80 bp, synthetic construct; identical to SEQ ID NO: 43767
  source 1..80: mol_type = other DNA

SEQ ID NO: 77441 - DNA, 80 bp, synthetic construct; identical to SEQ ID NO: 14813
  source 1..80: mol_type = other DNA

SEQ ID NO: 77442 - DNA, 80 bp, synthetic construct; identical to SEQ ID NO: 43769
  source 1..80: mol_type = other DNA

SEQ ID NO: 77443 - DNA, 80 bp, synthetic construct; identical to SEQ ID NO: 43770
  source 1..80: mol_type = other DNA

SEQ ID NO: 77444 - DNA, 80 bp, synthetic construct; identical to SEQ ID NO: 14814
  source 1..80: mol_type = other DNA

SEQ ID NO: 77445 - DNA, 80 bp, synthetic construct; identical to SEQ ID NO: 43772
  source 1..80: mol_type = other DNA

SEQ ID NO: 77446 - DNA, 80 bp, synthetic construct; identical to SEQ ID NO: 43773
  source 1..80: mol_type = other DNA

SEQ ID NO: 77447 - DNA, 80 bp, synthetic construct; identical to SEQ ID NO: 43775
  source 1..80: mol_type = other DNA

SEQ ID NO: 77448 - DNA, 80 bp, synthetic construct; identical to SEQ ID NO: 14815
  source 1..80: mol_type = other DNA

SEQ ID NO: 77449 - DNA, 80 bp, synthetic construct; identical to SEQ ID NO: 43777
  source 1..80: mol_type = other DNA

SEQ ID NO: 77450 - DNA, 80 bp, synthetic construct; identical to SEQ ID NO: 43778
  source 1..80: mol_type = other DNA

SEQ ID NO: 77451 - DNA, 80 bp, synthetic construct; identical to SEQ ID NO: 14816
  source 1..80: mol_type = other DNA

SEQ ID NO: 77452 - DNA, 80 bp, synthetic construct; identical to SEQ ID NO: 43780
  source 1..80: mol_type = other DNA

SEQ ID NO: 77453 - DNA, 80 bp, synthetic construct; identical to SEQ ID NO: 43781
  source 1..80: mol_type = other DNA

SEQ ID NO: 77454 - DNA, 80 bp, synthetic construct; identical to SEQ ID NO: 43782
  source 1..80: mol_type = other DNA

SEQ ID NO: 77455 - DNA, 80 bp, synthetic construct; identical to SEQ ID NO: 43783
  source 1..80: mol_type = other DNA

SEQ ID NO: 77456 - DNA, 80 bp, synthetic construct; identical to SEQ ID NO: 14817
  source 1..80: mol_type = other DNA

SEQ ID NO: 77457 - DNA, 80 bp, synthetic construct; identical to SEQ ID NO: 43785
  source 1..80: mol_type = other DNA

SEQ ID NO: 77458 - DNA, 80 bp, synthetic construct; identical to SEQ ID NO: 43786
  source 1..80: mol_type = other DNA

SEQ ID NO: 77459 - DNA, 80 bp, synthetic construct; identical to SEQ ID NO: 14818
  source 1..80: mol_type = other DNA

SEQ ID NO: 77460 - DNA, 80 bp, synthetic construct; identical to SEQ ID NO: 43788
  source 1..80: mol_type = other DNA

SEQ ID NO: 77461 - DNA, 80 bp, synthetic construct; identical to SEQ ID NO: 43789
  source 1..80: mol_type = other DNA

SEQ ID NO: 77462 - DNA, 80 bp, synthetic construct; identical to SEQ ID NO: 43790
  source 1..80: mol_type = other DNA

SEQ ID NO: 77463 - DNA, 80 bp, synthetic construct; identical to SEQ ID NO: 14819
  source 1..80: mol_type = other DNA

SEQ ID NO: 77464 - DNA, 80 bp, synthetic construct; identical to SEQ ID NO: 43792
  source 1..80: mol_type = other DNA

SEQ ID NO: 77465 - DNA, 80 bp, synthetic construct; identical to SEQ ID NO: 43793
  source 1..80: mol_type = other DNA

SEQ ID NO: 77466 - DNA, 80 bp, synthetic construct; identical to SEQ ID NO: 43794
  source 1..80: mol_type = other DNA

SEQ ID NO: 77467 - DNA, 80 bp, synthetic construct; identical to SEQ ID NO: 14820
  source 1..80: mol_type = other DNA

SEQ ID NO: 77468 - DNA, 80 bp, synthetic construct; identical to SEQ ID NO: 43796
  source 1..80: mol_type = other DNA

SEQ ID NO: 77469 - DNA, 80 bp, synthetic construct; identical to SEQ ID NO: 43797
  source 1..80: mol_type = other DNA

SEQ ID NO: 77470 - DNA, 80 bp, synthetic construct; identical to SEQ ID NO: 43798
  source 1..80: mol_type = other DNA

SEQ ID NO: 77471 - DNA, 80 bp, synthetic construct; identical to SEQ ID NO: 14821
  source 1..80: mol_type = other DNA

SEQ ID NO: 77472 - DNA, 80 bp, synthetic construct; identical to SEQ ID NO: 43800
  source 1..80: mol_type = other DNA

SEQ ID NO: 77473 - DNA, 80 bp, synthetic construct; identical to SEQ ID NO: 43801
  source 1..80: mol_type = other DNA

SEQ ID NO: 77474 - DNA, 80 bp, synthetic construct; identical to SEQ ID NO: 43802
  source 1..80: mol_type = other DNA

SEQ ID NO: 77475 - DNA, 80 bp, synthetic construct; identical to SEQ ID NO: 43803
  source 1..80: mol_type = other DNA

SEQ ID NO: 77476 - DNA, 80 bp, synthetic construct; identical to SEQ ID NO: 14822
  source 1..80: mol_type = other DNA

SEQ ID NO: 77477 - DNA, 80 bp, synthetic construct; identical to SEQ ID NO: 43805
  source 1..80: mol_type = other DNA

SEQ ID NO: 77478 - DNA, 80 bp, synthetic construct; identical to SEQ ID NO: 43806
  source 1..80: mol_type = other DNA

SEQ ID NO: 77479 - DNA, 80 bp, synthetic construct; identical to SEQ ID NO: 43807
  source 1..80: mol_type = other DNA

SEQ ID NO: 77480 - DNA, 80 bp, synthetic construct; identical to SEQ ID NO: 14823
  source 1..80: mol_type = other DNA

SEQ ID NO: 77481 - DNA, 80 bp, synthetic construct; identical to SEQ ID NO: 43809
  source 1..80: mol_type = other DNA

SEQ ID NO: 77482 - DNA, 80 bp, synthetic construct; identical to SEQ ID NO: 43810
  source 1..80: mol_type = other DNA

SEQ ID NO: 77483 - DNA, 80 bp, synthetic construct; identical to SEQ ID NO: 43811
  source 1..80: mol_type = other DNA

SEQ ID NO: 77484 - DNA, 80 bp, synthetic construct; identical to SEQ ID NO: 14824
  source 1..80: mol_type = other DNA

SEQ ID NO: 77485 - DNA, 80 bp, synthetic construct; identical to SEQ ID NO: 43813
  source 1..80: mol_type = other DNA

SEQ ID NO: 77486 - DNA, 80 bp, synthetic construct; identical to SEQ ID NO: 43815
  source 1..80: mol_type = other DNA

SEQ ID NO: 77487 - DNA, 80 bp, synthetic construct; identical to SEQ ID NO: 14825
  source 1..80: mol_type = other DNA

SEQ ID NO: 77488 - DNA, 80 bp, synthetic construct; identical to SEQ ID NO: 43819
  source 1..80: mol_type = other DNA

SEQ ID NO: 77489 - DNA, 80 bp, synthetic construct; identical to SEQ ID NO: 14826
  source 1..80: mol_type = other DNA

SEQ ID NO: 77490 - DNA, 80 bp, synthetic construct; identical to SEQ ID NO: 43823
  source 1..80: mol_type = other DNA

SEQ ID NO: 77491 - DNA, 80 bp, synthetic construct; identical to SEQ ID NO: 43825
  source 1..80: mol_type = other DNA

SEQ ID NO: 77492 - DNA, 80 bp, synthetic construct; identical to SEQ ID NO: 43827
  source 1..80: mol_type = other DNA

SEQ ID NO: 77493 - DNA, 80 bp, synthetic construct; identical to SEQ ID NO: 12255
  source 1..80: mol_type = other DNA

SEQ ID NO: 77494 - DNA, 80 bp, synthetic construct; identical to SEQ ID NO: 43831
  source 1..80: mol_type = other DNA

SEQ ID NO: 77495 - DNA, 80 bp, synthetic construct; identical to SEQ ID NO: 14829
  source 1..80: mol_type = other DNA

SEQ ID NO: 77496 - DNA, 80 bp, synthetic construct; identical to SEQ ID NO: 43835
  source 1..80: mol_type = other DNA

SEQ ID NO: 77497 - DNA, 80 bp, synthetic construct; identical to SEQ ID NO: 43837
  source 1..80: mol_type = other DNA

SEQ ID NO: 77498 - DNA, 80 bp, synthetic construct; identical to SEQ ID NO: 43838
  source 1..80: mol_type = other DNA

SEQ ID NO: 77499 - DNA, 80 bp, synthetic construct; identical to SEQ ID NO: 43839
  source 1..80: mol_type = other DNA

SEQ ID NO: 77500 - DNA, 80 bp, synthetic construct; identical to SEQ ID NO: 14831
  source 1..80: mol_type = other DNA

SEQ ID NO: 77501 - DNA, 80 bp, synthetic construct; identical to SEQ ID NO: 43841
  source 1..80: mol_type = other DNA

SEQ ID NO: 77502 - DNA, 80 bp, synthetic construct; identical to SEQ ID NO: 43842
  source 1..80: mol_type = other DNA

SEQ ID NO: 77503 - DNA, 80 bp, synthetic construct; identical to SEQ ID NO: 43843
  source 1..80: mol_type = other DNA

SEQ ID NO: 77504 - DNA, 80 bp, synthetic construct; identical to SEQ ID NO: 43844
  source 1..80: mol_type = other DNA

SEQ ID NO: 77505 - DNA, 80 bp, synthetic construct; identical to SEQ ID NO: 14832
  source 1..80: mol_type = other DNA

SEQ ID NO: 77506 - DNA, 80 bp, synthetic construct; identical to SEQ ID NO: 43846
  source 1..80: mol_type = other DNA

SEQ ID NO: 77507 - DNA, 80 bp, synthetic construct; identical to SEQ ID NO: 43847
  source 1..80: mol_type = other DNA

SEQ ID NO: 77508 - DNA, 80 bp, synthetic construct; identical to SEQ ID NO: 43848
  source 1..80: mol_type = other DNA

SEQ ID NO: 77509 - DNA, 80 bp, synthetic construct; identical to SEQ ID NO: 14833
  source 1..80: mol_type = other DNA

SEQ ID NO: 77510 - DNA, 80 bp, synthetic construct; identical to SEQ ID NO: 43850
  source 1..80: mol_type = other DNA

SEQ ID NO: 77511 - DNA, 80 bp, synthetic construct; identical to SEQ ID NO: 43851
  source 1..80: mol_type = other DNA

SEQ ID NO: 77512 - DNA, 80 bp, synthetic construct; identical to SEQ ID NO: 14834
  source 1..80: mol_type = other DNA

SEQ ID NO: 77513 - DNA, 80 bp, synthetic construct; identical to SEQ ID NO: 43853
  source 1..80: mol_type = other DNA

SEQ ID NO: 77514 - DNA, 80 bp, synthetic construct; identical to SEQ ID NO: 43854
  source 1..80: mol_type = other DNA

SEQ ID NO: 77515 - DNA, 80 bp, synthetic construct; identical to SEQ ID NO: 43855
  source 1..80: mol_type = other DNA

SEQ ID NO: 77516 - DNA, 80 bp, synthetic construct; identical to SEQ ID NO: 43856
  source 1..80: mol_type = other DNA

SEQ ID NO: 77517 - DNA, 80 bp, synthetic construct; identical to SEQ ID NO: 14835
  source 1..80: mol_type = other DNA

SEQ ID NO: 77518 - DNA, 80 bp, synthetic construct; identical to SEQ ID NO: 43858
  source 1..80: mol_type = other DNA

SEQ ID NO: 77519 - DNA, 80 bp, synthetic construct; identical to SEQ ID NO: 14836
  source 1..80: mol_type = other DNA

SEQ ID NO: 77520 - DNA, 80 bp, synthetic construct; identical to SEQ ID NO: 43861
  source 1..80: mol_type = other DNA

SEQ ID NO: 77521 - DNA, 80 bp, synthetic construct; identical to SEQ ID NO: 43862
  source 1..80: mol_type = other DNA

SEQ ID NO: 77522 - DNA, 80 bp, synthetic construct; identical to SEQ ID NO: 43863
  source 1..80: mol_type = other DNA

SEQ ID NO: 77523 - DNA, 80 bp, synthetic construct; identical to SEQ ID NO: 14837
  source 1..80: mol_type = other DNA

SEQ ID NO: 77524 - DNA, 80 bp, synthetic construct; identical to SEQ ID NO: 43865
  source 1..80: mol_type = other DNA

SEQ ID NO: 77525 - DNA, 80 bp, synthetic construct; identical to SEQ ID NO: 43866
  source 1..80: mol_type = other DNA

SEQ ID NO: 77526 - DNA, 80 bp, synthetic construct; identical to SEQ ID NO: 43867
  source 1..80: mol_type = other DNA

SEQ ID NO: 77527 - DNA, 80 bp, synthetic construct; identical to SEQ ID NO: 14838
  source 1..80: mol_type = other DNA

SEQ ID NO: 77528 - DNA, 80 bp, synthetic construct; identical to SEQ ID NO: 43869
  source 1..80: mol_type = other DNA

SEQ ID NO: 77529 - DNA, 80 bp, synthetic construct; identical to SEQ ID NO: 43870
  source 1..80: mol_type = other DNA

SEQ ID NO: 77530 - DNA, 80 bp, synthetic construct; identical to SEQ ID NO: 43871
  source 1..80: mol_type = other DNA

SEQ ID NO: 77531 - DNA, 80 bp, synthetic construct; identical to SEQ ID NO: 14839
  source 1..80: mol_type = other DNA

SEQ ID NO: 77532 - DNA, 80 bp, synthetic construct; identical to SEQ ID NO: 43873
  source 1..80: mol_type = other DNA

SEQ ID NO: 77533 - DNA, 80 bp, synthetic construct; identical to SEQ ID NO: 43874
  source 1..80: mol_type = other DNA

SEQ ID NO: 77534 - DNA, 80 bp, synthetic construct; identical to SEQ ID NO: 43875
  source 1..80: mol_type = other DNA

SEQ ID NO: 77535 - DNA, 80 bp, synthetic construct; identical to SEQ ID NO: 43876
  source 1..80: mol_type = other DNA

SEQ ID NO: 77536 - DNA, 80 bp, synthetic construct; identical to SEQ ID NO: 14840
  source 1..80: mol_type = other DNA

SEQ ID NO: 77537 - DNA, 80 bp, synthetic construct; identical to SEQ ID NO: 43878
  source 1..80: mol_type = other DNA

SEQ ID NO: 77538 - DNA, 80 bp, synthetic construct; identical to SEQ ID NO: 43879
  source 1..80: mol_type = other DNA

SEQ ID NO: 77539 - DNA, 80 bp, synthetic construct; identical to SEQ ID NO: 43880
  source 1..80: mol_type = other DNA

SEQ ID NO: 77540 - DNA, 80 bp, synthetic construct; identical to SEQ ID NO: 14841
  source 1..80: mol_type = other DNA

SEQ ID NO: 77541 - DNA, 80 bp, synthetic construct; identical to SEQ ID NO: 43882
  source 1..80: mol_type = other DNA

SEQ ID NO: 77542 - DNA, 80 bp, synthetic construct; identical to SEQ ID NO: 43883
  source 1..80: mol_type = other DNA

SEQ ID NO: 77543 - DNA, 80 bp, synthetic construct; identical to SEQ ID NO: 14842
  source 1..80: mol_type = other DNA

SEQ ID NO: 77544 - DNA, 80 bp, synthetic construct; identical to SEQ ID NO: 43886
  source 1..80: mol_type = other DNA

SEQ ID NO: 77545 - DNA, 80 bp, synthetic construct; identical to SEQ ID NO: 43887
  source 1..80: mol_type = other DNA

SEQ ID NO: 77546 - DNA, 80 bp, synthetic construct; identical to SEQ ID NO: 14843
  source 1..80: mol_type = other DNA

SEQ ID NO: 77547 - DNA, 80 bp, synthetic construct; identical to SEQ ID NO: 43889
  source 1..80: mol_type = other DNA

SEQ ID NO: 77548 - DNA, 80 bp, synthetic construct; identical to SEQ ID NO: 43890
  source 1..80: mol_type = other DNA

SEQ ID NO: 77549 - DNA, 80 bp, synthetic construct; identical to SEQ ID NO: 43891
  source 1..80: mol_type = other DNA

SEQ ID NO: 77550 - DNA, 80 bp, synthetic construct; identical to SEQ ID NO: 43892
  source 1..80: mol_type = other DNA

SEQ ID NO: 77551 - DNA, 80 bp, synthetic construct; identical to SEQ ID NO: 14844
  source 1..80: mol_type = other DNA

SEQ ID NO: 77552 - DNA, 80 bp, synthetic construct; identical to SEQ ID NO: 43894
  source 1..80: mol_type = other DNA

SEQ ID NO: 77553 - DNA, 80 bp, synthetic construct; identical to SEQ ID NO: 43895
  source 1..80: mol_type = other DNA

SEQ ID NO: 77554 - DNA, 80 bp, synthetic construct; identical to SEQ ID NO: 14845
  source 1..80: mol_type = other DNA

SEQ ID NO: 77555 - DNA, 80 bp, synthetic construct; identical to SEQ ID NO: 43898
  source 1..80: mol_type = other DNA

SEQ ID NO: 77556 - DNA, 80 bp, synthetic construct; identical to SEQ ID NO: 43899
  source 1..80: mol_type = other DNA

SEQ ID NO: 77557 - DNA, 80 bp, synthetic construct; identical to SEQ ID NO: 14846
  source 1..80: mol_type = other DNA

SEQ ID NO: 77558 - DNA, 80 bp, synthetic construct; identical to SEQ ID NO: 43901
  source 1..80: mol_type = other DNA

SEQ ID NO: 77559 - DNA, 80 bp, synthetic construct; identical to SEQ ID NO: 43902
  source 1..80: mol_type = other DNA

SEQ ID NO: 77560 - DNA, 80 bp, synthetic construct; identical to SEQ ID NO: 43903
  source 1..80: mol_type = other DNA

SEQ ID NO: 77561 - DNA, 80 bp, synthetic construct; identical to SEQ ID NO: 43904
  source 1..80: mol_type = other DNA

SEQ ID NO: 77562 - DNA, 80 bp, synthetic construct; identical to SEQ ID NO: 14847
  source 1..80: mol_type = other DNA

SEQ ID NO: 77563 - DNA, 80 bp, synthetic construct; identical to SEQ ID NO: 43906
  source 1..80: mol_type = other DNA

SEQ ID NO: 77564 - DNA, 80 bp, synthetic construct; identical to SEQ ID NO: 43907
  source 1..80: mol_type = other DNA

SEQ ID NO: 77565 - DNA, 80 bp, synthetic construct; identical to SEQ ID NO: 14848
  source 1..80: mol_type = other DNA

SEQ ID NO: 77566 - DNA, 80 bp, synthetic construct; identical to SEQ ID NO: 43909
  source 1..80: mol_type = other DNA

SEQ ID NO: 77567 - DNA, 80 bp, synthetic construct; identical to SEQ ID NO: 43910
  source 1..80: mol_type = other DNA

SEQ ID NO: 77568 - DNA, 80 bp, synthetic construct; identical to SEQ ID NO: 43911
  source 1..80: mol_type = other DNA

SEQ ID NO: 77569 - DNA, 80 bp, synthetic construct; identical to SEQ ID NO: 43912
  source 1..80: mol_type = other DNA

SEQ ID NO: 77570 - DNA, 80 bp, synthetic construct; identical to SEQ ID NO: 14849
  source 1..80: mol_type = other DNA

SEQ ID NO: 77571 - DNA, 80 bp, synthetic construct; identical to SEQ ID NO: 43914
  source 1..80: mol_type = other DNA

SEQ ID NO: 77572 - DNA, 80 bp, synthetic construct; identical to SEQ ID NO: 43915
  source 1..80: mol_type = other DNA

SEQ ID NO: 77573 - DNA, 80 bp, synthetic construct; identical to SEQ ID NO: 43916
  source 1..80: mol_type = other DNA

SEQ ID NO: 77574 - DNA, 80 bp, synthetic construct; identical to SEQ ID NO: 14850
  source 1..80: mol_type = other DNA

SEQ ID NO: 77575 - DNA, 80 bp, synthetic construct; identical to SEQ ID NO: 43918
  source 1..80: mol_type = other DNA

SEQ ID NO: 77576 - DNA, 80 bp, synthetic construct; identical to SEQ ID NO: 43919
  source 1..80: mol_type = other DNA

SEQ ID NO: 77577 - DNA, 80 bp, synthetic construct; identical to SEQ ID NO: 43920
  source 1..80: mol_type = other DNA

SEQ ID NO: 77578 - DNA, 80 bp, synthetic construct; identical to SEQ ID NO: 14851
  source 1..80: mol_type = other DNA

SEQ ID NO: 77579 - DNA, 80 bp, synthetic construct; identical to SEQ ID NO: 43922
  source 1..80: mol_type = other DNA

SEQ ID NO: 77580 - DNA, 80 bp, synthetic construct; identical to SEQ ID NO: 43924
  source 1..80: mol_type = other DNA

SEQ ID NO: 77581 - DNA, 80 bp, synthetic construct; identical to SEQ ID NO: 14852
  source 1..80: mol_type = other DNA

SEQ ID NO: 77582 - DNA, 80 bp, synthetic construct; identical to SEQ ID NO: 43926
  source 1..80: mol_type = other DNA

SEQ ID NO: 77583 - DNA, 80 bp, synthetic construct; identical to SEQ ID NO: 43927
  source 1..80: mol_type = other DNA

SEQ ID NO: 77584 - DNA, 80 bp, synthetic construct; identical to SEQ ID NO: 43928
  source 1..80: mol_type = other DNA

SEQ ID NO: 77585 - DNA, 80 bp, synthetic construct; identical to SEQ ID NO: 43929
  source 1..80: mol_type = other DNA

SEQ ID NO: 77586 - DNA, 80 bp, synthetic construct; identical to SEQ ID NO: 14853
  source 1..80: mol_type = other DNA

SEQ ID NO: 77587 - DNA, 80 bp, synthetic construct; identical to SEQ ID NO: 43931
  source 1..80: mol_type = other DNA

SEQ ID NO: 77588 - DNA, 80 bp, synthetic construct; identical to SEQ ID NO: 43932
  source 1..80: mol_type = other DNA

SEQ ID NO: 77589 - DNA, 80 bp, synthetic construct; identical to SEQ ID NO: 43933
  source 1..80: mol_type = other DNA

SEQ ID NO: 77590 - DNA, 80 bp, synthetic construct; identical to SEQ ID NO: 14854
  source 1..80: mol_type = other DNA

SEQ ID NO: 77591 - DNA, 80 bp, synthetic construct; identical to SEQ ID NO: 43935
  source 1..80: mol_type = other DNA

SEQ ID NO: 77592 - DNA, 80 bp, synthetic construct; identical to SEQ ID NO: 43936
  source 1..80: mol_type = other DNA

SEQ ID NO: 77593 - DNA, 80 bp, synthetic construct; identical to SEQ ID NO: 14855
  source 1..80: mol_type = other DNA

SEQ ID NO: 77594 - DNA, 80 bp, synthetic construct; identical to SEQ ID NO: 43938
  source 1..80: mol_type = other DNA

SEQ ID NO: 77595 - DNA, 80 bp, synthetic construct; identical to SEQ ID NO: 43939
  source 1..80: mol_type = other DNA

SEQ ID NO: 77596 - DNA, 80 bp, synthetic construct; identical to SEQ ID NO: 43940
  source 1..80: mol_type = other DNA

SEQ ID NO: 77597 - DNA, 80 bp, synthetic construct; identical to SEQ ID NO: 43941
  source 1..80: mol_type = other DNA

SEQ ID NO: 77598 - DNA, 80 bp, synthetic construct; identical to SEQ ID NO: 43942
  source 1..80: mol_type = other DNA

SEQ ID NO: 77599 - DNA, 80 bp, synthetic construct; identical to SEQ ID NO: 43943
  source 1..80: mol_type = other DNA

SEQ ID NO: 77600 - DNA, 80 bp, synthetic construct; identical to SEQ ID NO: 43944
  source 1..80: mol_type = other DNA

SEQ ID NO: 77601 - DNA, 80 bp, synthetic construct; identical to SEQ ID NO: 14856
  source 1..80: mol_type = other DNA

SEQ ID NO: 77602 - DNA, 80 bp, synthetic construct; identical to SEQ ID NO: 43946
  source 1..80: mol_type = other DNA

SEQ ID NO: 77603 - DNA, 80 bp, synthetic construct; identical to SEQ ID NO: 43947
  source 1..80: mol_type = other DNA

SEQ ID NO: 77604 - DNA, 80 bp, synthetic construct; identical to SEQ ID NO: 43948
  source 1..80: mol_type = other DNA

SEQ ID NO: 77605 - DNA, 80 bp, synthetic construct; identical to SEQ ID NO: 43949
  source 1..80: mol_type = other DNA

SEQ ID NO: 77606 - DNA, 80 bp, synthetic construct; identical to SEQ ID NO: 14857
  source 1..80: mol_type = other DNA

SEQ ID NO: 77607 - DNA, 80 bp, synthetic construct; identical to SEQ ID NO: 43951
  source 1..80: mol_type = other DNA

SEQ ID NO: 77608 - DNA, 80 bp, synthetic construct; identical to SEQ ID NO: 43952
  source 1..80: mol_type = other DNA

SEQ ID NO: 77609 - DNA, 80 bp, synthetic construct; identical to SEQ ID NO: 14858
  source 1..80: mol_type = other DNA

SEQ ID NO: 77610 - DNA, 80 bp, synthetic construct; identical to SEQ ID NO: 43954
  source 1..80: mol_type = other DNA

SEQ ID NO: 77611 - DNA, 80 bp, synthetic construct; identical to SEQ ID NO: 43955
  source 1..80: mol_type = other DNA

SEQ ID NO: 77612 - DNA, 80 bp, synthetic construct; identical to SEQ ID NO: 43956
  source 1..80: mol_type = other DNA

SEQ ID NO: 77613 - DNA, 80 bp, synthetic construct; identical to SEQ ID NO: 14859
  source 1..80: mol_type = other DNA

SEQ ID NO: 77614 - DNA, 80 bp, synthetic construct; identical to SEQ ID NO: 43958
  source 1..80: mol_type = other DNA

SEQ ID NO: 77615 - DNA, 80 bp, synthetic construct; identical to SEQ ID NO: 43959
  source 1..80: mol_type = other DNA

SEQ ID NO: 77616 - DNA, 80 bp, synthetic construct; identical to SEQ ID NO: 43960
  source 1..80: mol_type = other DNA

SEQ ID NO: 77617 - DNA, 80 bp, synthetic construct; identical to SEQ ID NO: 43961
  source 1..80: mol_type = other DNA

SEQ ID NO: 77618 - DNA, 80 bp, synthetic construct; identical to SEQ ID NO: 14860
  source 1..80: mol_type = other DNA

SEQ ID NO: 77619 - DNA, 80 bp, synthetic construct; identical to SEQ ID NO: 43963
  source 1..80: mol_type = other DNA

SEQ ID NO: 77620 - DNA, 80 bp, synthetic construct; identical to SEQ ID NO: 43964
  source 1..80: mol_type = other DNA

SEQ ID NO: 77621 - DNA, 80 bp, synthetic construct; identical to SEQ ID NO: 43965
  source 1..80: mol_type = other DNA

SEQ ID NO: 77622 - DNA, 80 bp, synthetic construct; identical to SEQ ID NO: 43967
  source 1..80: mol_type = other DNA

SEQ ID NO: 77623 - DNA, 80 bp, synthetic construct; identical to SEQ ID NO: 43968
  source 1..80: mol_type = other DNA

SEQ ID NO: 77624 - DNA, 80 bp, synthetic construct; identical to SEQ ID NO: 14862
  source 1..80: mol_type = other DNA

SEQ ID NO: 77625 - DNA, 80 bp, synthetic construct; identical to SEQ ID NO: 43972
  source 1..80: mol_type = other DNA

SEQ ID NO: 77626 - DNA, 80 bp, synthetic construct; identical to SEQ ID NO: 43973
  source 1..80: mol_type = other DNA

SEQ ID NO: 77627 - DNA, 80 bp, synthetic construct; identical to SEQ ID NO: 14863
  source 1..80: mol_type = other DNA

SEQ ID NO: 77628 - DNA, 80 bp, synthetic construct; identical to SEQ ID NO: 43975
  source 1..80: mol_type = other DNA

SEQ ID NO: 77629 - DNA, 80 bp, synthetic construct; identical to SEQ ID NO: 43976
  source 1..80: mol_type = other DNA

SEQ ID NO: 77630 - DNA, 80 bp, synthetic construct; identical to SEQ ID NO: 14864
  source 1..80: mol_type = other DNA

SEQ ID NO: 77631 - DNA, 80 bp, synthetic construct; identical to SEQ ID NO: 43978
  source 1..80: mol_type = other DNA

SEQ ID NO: 77632 - DNA, 80 bp, synthetic construct; identical to SEQ ID NO: 43980
  source 1..80: mol_type = other DNA

SEQ ID NO: 77633 - DNA, 80 bp, synthetic construct; identical to SEQ ID NO: 43981
  source 1..80: mol_type = other DNA

SEQ ID NO: 77634 - DNA, 80 bp, synthetic construct; identical to SEQ ID NO: 14865
  source 1..80: mol_type = other DNA

SEQ ID NO: 77635 - DNA, 80 bp, synthetic construct; identical to SEQ ID NO: 43984
  source 1..80: mol_type = other DNA

SEQ ID NO: 77636 - DNA, 80 bp, synthetic construct; identical to SEQ ID NO: 43985
  source 1..80: mol_type = other DNA

SEQ ID NO: 77637 - DNA, 80 bp, synthetic construct; identical to SEQ ID NO: 43986
  source 1..80: mol_type = other DNA

SEQ ID NO: 77638 - DNA, 80 bp, synthetic construct; identical to SEQ ID NO: 14866
  source 1..80: mol_type = other DNA

SEQ ID NO: 77639 - DNA, 80 bp, synthetic construct; identical to SEQ ID NO: 43988
  source 1..80: mol_type = other DNA

SEQ ID NO: 77640 - DNA, 80 bp, synthetic construct; identical to SEQ ID NO: 43989
  source 1..80: mol_type = other DNA

SEQ ID NO: 77641 - DNA, 80 bp, synthetic construct; identical to SEQ ID NO: 43990
  source 1..80: mol_type = other DNA

SEQ ID NO: 77642 - DNA, 80 bp, synthetic construct; identical to SEQ ID NO: 43991
  source 1..80: mol_type = other DNA

SEQ ID NO: 77643 - DNA, 80 bp, synthetic construct; identical to SEQ ID NO: 14867
  source 1..80: mol_type = other DNA

SEQ ID NO: 77644 - DNA, 80 bp, synthetic construct; identical to SEQ ID NO: 43993
  source 1..80: mol_type = other DNA

SEQ ID NO: 77645 - DNA, 80 bp, synthetic construct; identical to SEQ ID NO: 43994
  source 1..80: mol_type = other DNA

SEQ ID NO: 77646 - DNA, 80 bp, synthetic construct; identical to SEQ ID NO: 14868
  source 1..80: mol_type = other DNA

SEQ ID NO: 77647 - DNA, 80 bp, synthetic construct; identical to SEQ ID NO: 43996
  source 1..80: mol_type = other DNA

SEQ ID NO: 77648 - DNA, 80 bp, synthetic construct; identical to SEQ ID NO: 43997
  source 1..80: mol_type = other DNA

SEQ ID NO: 77649 - DNA, 80 bp, synthetic construct; identical to SEQ ID NO: 43998
  source 1..80: mol_type = other DNA

SEQ ID NO: 77650 - DNA, 80 bp, synthetic construct; identical to SEQ ID NO: 14869
  source 1..80: mol_type = other DNA

SEQ ID NO: 77651 - DNA, 80 bp, synthetic construct; identical to SEQ ID NO: 44000
  source 1..80: mol_type = other DNA

SEQ ID NO: 77652 - DNA, 80 bp, synthetic construct; identical to SEQ ID NO: 44001
  source 1..80: mol_type = other DNA

SEQ ID NO: 77653 - DNA, 80 bp, synthetic construct; identical to SEQ ID NO: 44002
  source 1..80: mol_type = other DNA

SEQ ID NO: 77654 - DNA, 80 bp, synthetic construct; identical to SEQ ID NO: 44003
  source 1..80: mol_type = other DNA

SEQ ID NO: 77655 - DNA, 80 bp, synthetic construct; identical to SEQ ID NO: 14870
  source 1..80: mol_type = other DNA

SEQ ID NO: 77656 - DNA, 80 bp, synthetic construct; identical to SEQ ID NO: 44005
  source 1..80: mol_type = other DNA

SEQ ID NO: 77657 - DNA, 80 bp, synthetic construct; identical to SEQ ID NO: 44006
  source 1..80: mol_type = other DNA

SEQ ID NO: 77658 - DNA, 80 bp, synthetic construct; identical to SEQ ID NO: 44007
  source 1..80: mol_type = other DNA

SEQ ID NO: 77659 - DNA, 80 bp, synthetic construct; identical to SEQ ID NO: 14871
  source 1..80: mol_type = other DNA

SEQ ID NO: 77660 - DNA, 80 bp, synthetic construct; identical to SEQ ID NO: 44009
  source 1..80: mol_type = other DNA

SEQ ID NO: 77661 - DNA, 80 bp, synthetic construct; identical to SEQ ID NO: 44010
  source 1..80: mol_type = other DNA

SEQ ID NO: 77662 - DNA, 80 bp, synthetic construct; identical to SEQ ID NO: 44011
  source 1..80: mol_type = other DNA

SEQ ID NO: 77663 - DNA, 80 bp, synthetic construct; identical to SEQ ID NO: 14872
  source 1..80: mol_type = other DNA

SEQ ID NO: 77664 - DNA, 80 bp, synthetic construct; identical to SEQ ID NO: 44013
  source 1..80: mol_type = other DNA

SEQ ID NO: 77665 - DNA, 80 bp, synthetic construct; identical to SEQ ID NO: 14873
  source 1..80: mol_type = other DNA

SEQ ID NO: 77666 - DNA, 80 bp, synthetic construct; identical to SEQ ID NO: 44015
  source 1..80: mol_type = other DNA

SEQ ID NO: 77667 - DNA, 80 bp, synthetic construct; identical to SEQ ID NO: 44016
  source 1..80: mol_type = other DNA

SEQ ID NO: 77668 - DNA, 80 bp, synthetic construct; identical to SEQ ID NO: 44017
  source 1..80: mol_type = other DNA

SEQ ID NO: 77669 - DNA, 80 bp, synthetic construct; identical to SEQ ID NO: 14874
  source 1..80: mol_type = other DNA

SEQ ID NO: 77670 - DNA, 80 bp, synthetic construct; identical to SEQ ID NO: 44019
  source 1..80: mol_type = other DNA

SEQ ID NO: 77671 - DNA, 80 bp, synthetic construct; identical to SEQ ID NO: 44020
  source 1..80: mol_type = other DNA

SEQ ID NO: 77672 - DNA, 80 bp, synthetic construct; identical to SEQ ID NO: 44021
  source 1..80: mol_type = other DNA

SEQ ID NO: 77673 - DNA, 80 bp, synthetic construct; identical to SEQ ID NO: 14875
  source 1..80: mol_type = other DNA

SEQ ID NO: 77674 - DNA, 80 bp, synthetic construct; identical to SEQ ID NO: 44024
  source 1..80: mol_type = other DNA

SEQ ID NO: 77675 - DNA, 80 bp, synthetic construct; identical to SEQ ID NO: 44025
  source 1..80: mol_type = other DNA

SEQ ID NO: 77676 - DNA, 80 bp, synthetic construct; identical to SEQ ID NO: 44026
  source 1..80: mol_type = other DNA

SEQ ID NO: 77677 - DNA, 80 bp, synthetic construct; identical to SEQ ID NO: 14876
  source 1..80: mol_type = other DNA

SEQ ID NO: 77678 - DNA, 80 bp, synthetic construct; identical to SEQ ID NO: 44028
  source 1..80: mol_type = other DNA

SEQ ID NO: 77679 - DNA, 80 bp, synthetic construct; identical to SEQ ID NO: 44029
  source 1..80: mol_type = other DNA

SEQ ID NO: 77680 - DNA, 80 bp, synthetic construct; identical to SEQ ID NO: 14877
  source 1..80: mol_type = other DNA

SEQ ID NO: 77681 - DNA, 80 bp, synthetic construct; identical to SEQ ID NO: 44031
  source 1..80: mol_type = other DNA

SEQ ID NO: 77682 - DNA, 80 bp, synthetic construct; identical to SEQ ID NO: 44032
  source 1..80: mol_type = other DNA

SEQ ID NO: 77683 - DNA, 80 bp, synthetic construct; identical to SEQ ID NO: 44033
  source 1..80: mol_type = other DNA

SEQ ID NO: 77684 - DNA, 80 bp, synthetic construct; identical to SEQ ID NO: 44034
  source 1..80: mol_type = other DNA

SEQ ID NO: 77685 - DNA, 80 bp, synthetic construct; identical to SEQ ID NO: 14878
  source 1..80: mol_type = other DNA

SEQ ID NO: 77686 - DNA, 80 bp, synthetic construct; identical to SEQ ID NO: 44036
  source 1..80: mol_type = other DNA

SEQ ID NO: 77687 - DNA, 80 bp, synthetic construct; identical to SEQ ID NO: 44037
  source 1..80: mol_type = other DNA

SEQ ID NO: 77688 - DNA, 80 bp, synthetic construct; identical to SEQ ID NO: 44038
  source 1..80: mol_type = other DNA

SEQ ID NO: 77689 - DNA, 80 bp, synthetic construct; identical to SEQ ID NO: 44039
  source 1..80: mol_type = other DNA

SEQ ID NO: 77690 - DNA, 80 bp, synthetic construct; identical to SEQ ID NO: 14879
  source 1..80: mol_type = other DNA

SEQ ID NO: 77691 - DNA, 80 bp, synthetic construct; identical to SEQ ID NO: 44041
  source 1..80: mol_type = other DNA

SEQ ID NO: 77692 - DNA, 80 bp, synthetic construct; identical to SEQ ID NO: 44042
  source 1..80: mol_type = other DNA

SEQ ID NO: 77693 - DNA, 80 bp, synthetic construct; identical to SEQ ID NO: 14880
  source 1..80: mol_type = other DNA

SEQ ID NO: 77694 - DNA, 80 bp, synthetic construct; identical to SEQ ID NO: 44044
  source 1..80: mol_type = other DNA

SEQ ID NO: 77695 - DNA, 80 bp, synthetic construct; identical to SEQ ID NO: 44045
  source 1..80: mol_type = other DNA

SEQ ID NO: 77696 - DNA, 80 bp, synthetic construct; identical to SEQ ID NO: 44046
  source 1..80: mol_type = other DNA

SEQ ID NO: 77697 - DNA, 80 bp, synthetic construct; identical to SEQ ID NO: 44047
  source 1..80: mol_type = other DNA

SEQ ID NO: 77698 - DNA, 80 bp, synthetic construct; identical to SEQ ID NO: 14881
  source 1..80: mol_type = other DNA

SEQ ID NO: 77699 - DNA, 80 bp, synthetic construct; identical to SEQ ID NO: 44049
  source 1..80: mol_type = other DNA

SEQ ID NO: 77700 - DNA, 80 bp, synthetic construct; identical to SEQ ID NO: 44050
  source 1..80: mol_type = other DNA

SEQ ID NO: 77701 - DNA, 80 bp, synthetic construct; identical to SEQ ID NO: 44051
  source 1..80: mol_type = other DNA

SEQ ID NO: 77702 - DNA, 80 bp, synthetic construct; identical to SEQ ID NO: 14882
  source 1..80: mol_type = other DNA

SEQ ID NO: 77703 - DNA, 80 bp, synthetic construct; identical to SEQ ID NO: 44053
  source 1..80: mol_type = other DNA

SEQ ID NO: 77704 - DNA, 80 bp, synthetic construct; identical to SEQ ID NO: 44054
  source 1..80: mol_type = other DNA

SEQ ID NO: 77705 - DNA, 80 bp, synthetic construct; identical to SEQ ID NO: 44055
  source 1..80: mol_type = other DNA

SEQ ID NO: 77706 - DNA, 80 bp, synthetic construct; identical to SEQ ID NO: 44056
  source 1..80: mol_type = other DNA

SEQ ID NO: 77707 - DNA, 80 bp, synthetic construct; identical to SEQ ID NO: 14883
  source 1..80: mol_type = other DNA

SEQ ID NO: 77708 - DNA, 80 bp, synthetic construct; identical to SEQ ID NO: 44058
  source 1..80: mol_type = other DNA

SEQ ID NO: 77709 - DNA, 80 bp, synthetic construct; identical to SEQ ID NO: 44059
  source 1..80: mol_type = other DNA

SEQ ID NO: 77710 - DNA, 80 bp, synthetic construct; identical to SEQ ID NO: 44060
  source 1..80: mol_type = other DNA

SEQ ID NO: 77711 - DNA, 80 bp, synthetic construct; identical to SEQ ID NO: 14884
  source 1..80: mol_type = other DNA

SEQ ID NO: 77712 - DNA, 80 bp, synthetic construct; identical to SEQ ID NO: 44062
  source 1..80: mol_type = other DNA

SEQ ID NO: 77713 - DNA, 80 bp, synthetic construct; identical to SEQ ID NO: 44063
  source 1..80: mol_type = other DNA

SEQ ID NO: 77714 - DNA, 80 bp, synthetic construct; identical to SEQ ID NO: 44064
  source 1..80: mol_type = other DNA

SEQ ID NO: 77715 - DNA, 80 bp, synthetic construct; identical to SEQ ID NO: 14885
  source 1..80: mol_type = other DNA

SEQ ID NO: 77716 - DNA, 80 bp, synthetic construct; identical to SEQ ID NO: 44066
  source 1..80: mol_type = other DNA

SEQ ID NO: 77717 - DNA, 80 bp, synthetic construct; identical to SEQ ID NO: 44067
  source 1..80: mol_type = other DNA

SEQ ID NO: 77718 - DNA, 80 bp, synthetic construct; identical to SEQ ID NO: 14886
  source 1..80: mol_type = other DNA

SEQ ID NO: 77719 - DNA, 80 bp, synthetic construct; identical to SEQ ID NO: 44069
  source 1..80: mol_type = other DNA

SEQ ID NO: 77720 - DNA, 80 bp, synthetic construct; identical to SEQ ID NO: 44070
  source 1..80: mol_type = other DNA

SEQ ID NO: 77721 - DNA, 80 bp, synthetic construct; identical to SEQ ID NO: 44071
  source 1..80: mol_type = other DNA

SEQ ID NO: 77722 - DNA, 80 bp, synthetic construct; identical to SEQ ID NO: 14887
  source 1..80: mol_type = other DNA

SEQ ID NO: 77723 - DNA, 80 bp, synthetic construct; identical to SEQ ID NO: 44073
  source 1..80: mol_type = other DNA

SEQ ID NO: 77724 - DNA, 80 bp, synthetic construct; identical to SEQ ID NO: 44074
  source 1..80: mol_type = other DNA

SEQ ID NO: 77725 - DNA, 80 bp, synthetic construct; identical to SEQ ID NO: 44075
  source 1..80: mol_type = other DNA

SEQ ID NO: 77726 - DNA, 80 bp, synthetic construct; identical to SEQ ID NO: 44076
  source 1..80: mol_type = other DNA

SEQ ID NO: 77727 - DNA, 80 bp, synthetic construct; identical to SEQ ID NO: 14888
  source 1..80: mol_type = other DNA

SEQ ID NO: 77728 - DNA, 80 bp, synthetic construct; identical to SEQ ID NO: 44078
  source 1..80: mol_type = other DNA

SEQ ID NO: 77729 - DNA, 80 bp, synthetic construct; identical to SEQ ID NO: 44079
  source 1..80: mol_type = other DNA

SEQ ID NO: 77730 - DNA, 80 bp, synthetic construct; identical to SEQ ID NO: 14889
  source 1..80: mol_type = other DNA

SEQ ID NO: 77731 - DNA, 80 bp, synthetic construct; identical to SEQ ID NO: 44081
  source 1..80: mol_type = other DNA

SEQ ID NO: 77732 - DNA, 80 bp, synthetic construct; identical to SEQ ID NO: 44083
  source 1..80: mol_type = other DNA

SEQ ID NO: 77733 - DNA, 80 bp, synthetic construct; identical to SEQ ID NO: 14890
  source 1..80: mol_type = other DNA

SEQ ID NO: 77734 - DNA, 80 bp, synthetic construct; identical to SEQ ID NO: 44085
  source 1..80: mol_type = other DNA

SEQ ID NO: 77735 - DNA, 80 bp, synthetic construct; identical to SEQ ID NO: 44086
  source 1..80: mol_type = other DNA

SEQ ID NO: 77736 - DNA, 80 bp, synthetic construct; identical to SEQ ID NO: 44087
  source 1..80: mol_type = other DNA

SEQ ID NO: 77737 - DNA, 80 bp, synthetic construct; identical to SEQ ID NO: 14891
  source 1..80: mol_type = other DNA

SEQ ID NO: 77738 - DNA, 80 bp, synthetic construct; identical to SEQ ID NO: 44089
  source 1..80: mol_type = other DNA

SEQ ID NO: 77739 - DNA, 80 bp, synthetic construct; identical to SEQ ID NO: 44090
  source 1..80: mol_type = other DNA

SEQ ID NO: 77740 - DNA, 80 bp, synthetic construct; identical to SEQ ID NO: 44091
  source 1..80: mol_type = other DNA

SEQ ID NO: 77741 - DNA, 80 bp, synthetic construct; identical to SEQ ID NO: 44092
  source 1..80: mol_type = other DNA

SEQ ID NO: 77742 - DNA, 80 bp, synthetic construct; identical to SEQ ID NO: 14892
  source 1..80: mol_type = other DNA

SEQ ID NO: 77743 - DNA, 80 bp, synthetic construct; identical to SEQ ID NO: 44095
  source 1..80: mol_type = other DNA

SEQ ID NO: 77744 - DNA, 80 bp, synthetic construct; identical to SEQ ID NO: 44096
  source 1..80: mol_type = other DNA

SEQ ID NO: 77745 - DNA, 80 bp, synthetic construct; identical to SEQ ID NO: 14893
  source 1..80: mol_type = other DNA

SEQ ID NO: 77746 - DNA, 80 bp, synthetic construct; identical to SEQ ID NO: 44098
  source 1..80: mol_type = other DNA

SEQ ID NO: 77747 - DNA, 80 bp, synthetic construct; identical to SEQ ID NO: 44099
  source 1..80: mol_type = other DNA

SEQ ID NO: 77748 - DNA, 80 bp, synthetic construct; identical to SEQ ID NO: 14894
  source 1..80: mol_type = other DNA

SEQ ID NO: 77749 - DNA, 80 bp, synthetic construct; identical to SEQ ID NO: 44101
  source 1..80: mol_type = other DNA

SEQ ID NO: 77750 - DNA, 80 bp, synthetic construct; identical to SEQ ID NO: 44103
  source 1..80: mol_type = other DNA

SEQ ID NO: 77751 - DNA, 80 bp, synthetic construct; identical to SEQ ID NO: 14895
  source 1..80: mol_type = other DNA

SEQ ID NO: 77752 - DNA, 80 bp, synthetic construct; identical to SEQ ID NO: 44107
  source 1..80: mol_type = other DNA

SEQ ID NO: 77753 - DNA, 80 bp, synthetic construct; identical to SEQ ID NO: 44108
  source 1..80: mol_type = other DNA

SEQ ID NO: 77754 - DNA, 80 bp, synthetic construct; identical to SEQ ID NO: 14896
  source 1..80: mol_type = other DNA

SEQ ID NO: 77755 - DNA, 80 bp, synthetic construct; identical to SEQ ID NO: 44110
  source 1..80: mol_type = other DNA

SEQ ID NO: 77756 - DNA, 80 bp, synthetic construct; identical to SEQ ID NO: 44111
  source 1..80: mol_type = other DNA

SEQ ID NO: 77757 - DNA, 80 bp, synthetic construct; identical to SEQ ID NO: 44112
  source 1..80: mol_type = other DNA

SEQ ID NO: 77758 - DNA, 80 bp, synthetic construct; identical to SEQ ID NO: 14897
  source 1..80: mol_type = other DNA

SEQ ID NO: 77759 - DNA, 80 bp, synthetic construct; identical to SEQ ID NO: 44114
  source 1..80: mol_type = other DNA

SEQ ID NO: 77760 - DNA, 80 bp, synthetic construct; identical to SEQ ID NO: 44115
  source 1..80: mol_type = other DNA

SEQ ID NO: 77761 - DNA, 80 bp, synthetic construct; identical to SEQ ID NO: 14898
  source 1..80: mol_type = other DNA

SEQ ID NO: 77762 - DNA, 80 bp, synthetic construct; identical to SEQ ID NO: 44117
  source 1..80: mol_type = other DNA

SEQ ID NO: 77763 - DNA, 80 bp, synthetic construct; identical to SEQ ID NO: 44118
  source 1..80: mol_type = other DNA

SEQ ID NO: 77764 - DNA, 80 bp, synthetic construct; identical to SEQ ID NO: 44119
  source 1..80: mol_type = other DNA

SEQ ID NO: 77765 - DNA, 80 bp, synthetic construct; identical to SEQ ID NO: 14899
  source 1..80: mol_type = other DNA

SEQ ID NO: 77766 - DNA, 80 bp, synthetic construct; identical to SEQ ID NO: 44121
  source 1..80: mol_type = other DNA

SEQ ID NO: 77767 - DNA, 80 bp, synthetic construct; identical to SEQ ID NO: 44122
  source 1..80: mol_type = other DNA

SEQ ID NO: 77768 - DNA, 80 bp, synthetic construct; identical to SEQ ID NO: 14900
  source 1..80: mol_type = other DNA

SEQ ID NO: 77769 - DNA, 80 bp, synthetic construct; identical to SEQ ID NO: 44125
  source 1..80: mol_type = other DNA

SEQ ID NO: 77770 - DNA, 80 bp, synthetic construct; identical to SEQ ID NO: 44126
  source 1..80: mol_type = other DNA

SEQ ID NO: 77771 - DNA, 80 bp, synthetic construct; identical to SEQ ID NO: 44127
  source 1..80: mol_type = other DNA

SEQ ID NO: 77772 - DNA, 80 bp, synthetic construct; identical to SEQ ID NO: 14901
  source 1..80: mol_type = other DNA

SEQ ID NO: 77773 - DNA, 80 bp, synthetic construct; identical to SEQ ID NO: 44129
  source 1..80: mol_type = other DNA

SEQ ID NO: 77774 - DNA, 80 bp, synthetic construct; identical to SEQ ID NO: 44130
  source 1..80: mol_type = other DNA

SEQ ID NO: 77775 - DNA, 80 bp, synthetic construct; identical to SEQ ID NO: 44131
  source 1..80: mol_type = other DNA

SEQ ID NO: 77776 - DNA, 80 bp, synthetic construct; identical to SEQ ID NO: 44132
  source 1..80: mol_type = other DNA

SEQ ID NO: 77777 - DNA, 80 bp, synthetic construct; identical to SEQ ID NO: 14902
  source 1..80: mol_type = other DNA

SEQ ID NO: 77778 - DNA, 80 bp, synthetic construct; identical to SEQ ID NO: 44134
  source 1..80: mol_type = other DNA

SEQ ID NO: 77779 - DNA, 80 bp, synthetic construct; identical to SEQ ID NO: 44135
  source 1..80: mol_type = other DNA

SEQ ID NO: 77780 - DNA, 80 bp, synthetic construct; identical to SEQ ID NO: 44136
  source 1..80: mol_type = other DNA

SEQ ID NO: 77781 - DNA, 80 bp, synthetic construct; identical to SEQ ID NO: 14903
  source 1..80: mol_type = other DNA

SEQ ID NO: 77782 - DNA, 80 bp, synthetic construct; identical to SEQ ID NO: 44138
  source 1..80: mol_type = other DNA

SEQ ID NO: 77783 - DNA, 80 bp, synthetic construct; identical to SEQ ID NO: 44139
  source 1..80: mol_type = other DNA

SEQ ID NO: 77784 - DNA, 80 bp, synthetic construct; identical to SEQ ID NO: 44140
  source 1..80: mol_type = other DNA

SEQ ID NO: 77785 - DNA, 80 bp, synthetic construct; identical to SEQ ID NO: 14904
  source 1..80: mol_type = other DNA

SEQ ID NO: 77786 - DNA, 80 bp, synthetic construct; identical to SEQ ID NO: 44142
  source 1..80: mol_type = other DNA

SEQ ID NO: 77787 - DNA, 80 bp, synthetic construct; identical to SEQ ID NO: 44143
  source 1..80: mol_type = other DNA

SEQ ID NO: 77788 - DNA, 80 bp, synthetic construct; identical to SEQ ID NO: 44144
  source 1..80: mol_type = other DNA

SEQ ID NO: 77789 - DNA, 80 bp, synthetic construct; identical to SEQ ID NO: 14905
  source 1..80: mol_type = other DNA

SEQ ID NO: 77790 - DNA, 80 bp, synthetic construct; identical to SEQ ID NO: 44146
  source 1..80: mol_type = other DNA

SEQ ID NO: 77791 - DNA, 80 bp, synthetic construct; identical to SEQ ID NO: 44147
  source 1..80: mol_type = other DNA

SEQ ID NO: 77792 - DNA, 80 bp, synthetic construct; identical to SEQ ID NO: 44148
  source 1..80: mol_type = other DNA

SEQ ID NO: 77793 - DNA, 80 bp, synthetic construct; identical to SEQ ID NO: 14906
  source 1..80: mol_type = other DNA

SEQ ID NO: 77794 - DNA, 80 bp, synthetic construct; identical to SEQ ID NO: 44150
  source 1..80: mol_type = other DNA

SEQ ID NO: 77795 - DNA, 80 bp, synthetic construct; identical to SEQ ID NO: 44151
  source 1..80: mol_type = other DNA

SEQ ID NO: 77796 - DNA, 80 bp, synthetic construct; identical to SEQ ID NO: 14907
  source 1..80: mol_type = other DNA

SEQ ID NO: 77797 - DNA, 80 bp, synthetic construct; identical to SEQ ID NO: 44153
  source 1..80: mol_type = other DNA

SEQ ID NO: 77798 - DNA, 80 bp, synthetic construct; identical to SEQ ID NO: 44154
  source 1..80: mol_type = other DNA

SEQ ID NO: 77799 - DNA, 80 bp, synthetic construct; identical to SEQ ID NO: 44155
  source 1..80: mol_type = other DNA

SEQ ID NO: 77800 - DNA, 80 bp, synthetic construct; identical to SEQ ID NO: 14908
  source 1..80: mol_type = other DNA

SEQ ID NO: 77801 - DNA, 80 bp, synthetic construct; identical to SEQ ID NO: 44157
  source 1..80: mol_type = other DNA

SEQ ID NO: 77802 - DNA, 80 bp, synthetic construct; identical to SEQ ID NO: 44158
  source 1..80: mol_type = other DNA

SEQ ID NO: 77803 - DNA, 80 bp, synthetic construct; identical to SEQ ID NO: 14909
  source 1..80: mol_type = other DNA

SEQ ID NO: 77804 - DNA, 80 bp, synthetic construct; identical to SEQ ID NO: 44160
  source 1..80: mol_type = other DNA

SEQ ID NO: 77805 - DNA, 80 bp, synthetic construct; identical to SEQ ID NO: 44161
  source 1..80: mol_type = other DNA

SEQ ID NO: 77806 - DNA, 80 bp, synthetic construct; identical to SEQ ID NO: 44162
  source 1..80: mol_type = other DNA

SEQ ID NO: 77807 - DNA, 80 bp, synthetic construct; identical to SEQ ID NO: 44163
  source 1..80: mol_type = other DNA

SEQ ID NO: 77808 - DNA, 80 bp, synthetic construct; identical to SEQ ID NO: 44164
  source 1..80: mol_type = other DNA

SEQ ID NO: 77809 - DNA, 80 bp, synthetic construct; identical to SEQ ID NO: 44165
  source 1..80: mol_type = other DNA

SEQ ID NO: 77810 - DNA, 80 bp, synthetic construct; identical to SEQ ID NO: 14910
  source 1..80: mol_type = other DNA

SEQ ID NO: 77811 - DNA, 80 bp, synthetic construct; identical to SEQ ID NO: 14911
  source 1..80: mol_type = other DNA

SEQ ID NO: 77812 - DNA, 80 bp, synthetic construct; identical to SEQ ID NO: 44168
  source 1..80: mol_type = other DNA

SEQ ID NO: 77813 - DNA, 80 bp, synthetic construct; identical to SEQ ID NO: 44169
  source 1..80: mol_type = other DNA

SEQ ID NO: 77814 - DNA, 80 bp, synthetic construct; identical to SEQ ID NO: 44170
  source 1..80: mol_type = other DNA

SEQ ID NO: 77815 - DNA, 80 bp, synthetic construct; identical to SEQ ID NO: 14912
  source 1..80: mol_type = other DNA

SEQ ID NO: 77816 - DNA, 80 bp, synthetic construct; identical to SEQ ID NO: 44172
  source 1..80: mol_type = other DNA

SEQ ID NO: 77817 - DNA, 80 bp, synthetic construct; identical to SEQ ID NO: 44173
  source 1..80: mol_type = other DNA

SEQ ID NO: 77818 - DNA, 80 bp, synthetic construct; identical to SEQ ID NO: 44174
  source 1..80: mol_type = other DNA

SEQ ID NO: 77819 - DNA, 80 bp, synthetic construct; identical to SEQ ID NO: 44175
  source 1..80: mol_type = other DNA

SEQ ID NO: 77820 - DNA, 80 bp, synthetic construct; identical to SEQ ID NO: 44176
  source 1..80: mol_type = other DNA

SEQ ID NO: 77821 - DNA, 80 bp, synthetic construct; identical to SEQ ID NO: 14913
  source 1..80: mol_type = other DNA

SEQ ID NO: 77822 - DNA, 80 bp, synthetic construct; identical to SEQ ID NO: 44178
  source 1..80: mol_type = other DNA

SEQ ID NO: 77823 - DNA, 80 bp, synthetic construct; identical to SEQ ID NO: 44179
  source 1..80: mol_type = other DNA

SEQ ID NO: 77824 - DNA, 80 bp, synthetic construct; identical to SEQ ID NO: 44180
  source 1..80: mol_type = other DNA

SEQ ID NO: 77825 - DNA, 80 bp, synthetic construct; identical to SEQ ID NO: 44181
  source 1..80: mol_type = other DNA

SEQ ID NO: 77826 - DNA, 80 bp, synthetic construct; identical to SEQ ID NO: 14915
  source 1..80: mol_type = other DNA

SEQ ID NO: 77827 - DNA, 80 bp, synthetic construct; identical to SEQ ID NO: 44183
  source 1..80: mol_type = other DNA

SEQ ID NO: 77828 - DNA, 80 bp, synthetic construct; identical to SEQ ID NO: 44184
  source 1..80: mol_type = other DNA

SEQ ID NO: 77829 - DNA, 80 bp, synthetic construct; identical to SEQ ID NO: 44185
  source 1..80: mol_type = other DNA

SEQ ID NO: 77830 - DNA, 80 bp, synthetic construct; identical to SEQ ID NO: 14916
  source 1..80: mol_type = other DNA

SEQ ID NO: 77831 - DNA, 80 bp, synthetic construct; identical to SEQ ID NO: 44187
  source 1..80: mol_type = other DNA

SEQ ID NO: 77832 - DNA, 80 bp, synthetic construct; identical to SEQ ID NO: 44188
  source 1..80: mol_type = other DNA

SEQ ID NO: 77833 - DNA, 80 bp, synthetic construct; identical to SEQ ID NO: 44189
  source 1..80: mol_type = other DNA

SEQ ID NO: 77834 - DNA, 80 bp, synthetic construct; identical to SEQ ID NO: 14917
  source 1..80: mol_type = other DNA

SEQ ID NO: 77835 - DNA, 80 bp, synthetic construct; identical to SEQ ID NO: 44191
  source 1..80: mol_type = other DNA

SEQ ID NO: 77836 - DNA, 80 bp, synthetic construct; identical to SEQ ID NO: 44192
  source 1..80: mol_type = other DNA

SEQ ID NO: 77837 - DNA, 80 bp, synthetic construct; identical to SEQ ID NO: 44193
  source 1..80: mol_type = other DNA

SEQ ID NO: 77838 - DNA, 80 bp, synthetic construct; identical to SEQ ID NO: 14918
  source 1..80: mol_type = other DNA

SEQ ID NO: 77839 - DNA, 80 bp, synthetic construct; identical to SEQ ID NO: 44195
  source 1..80: mol_type = other DNA

SEQ ID NO: 77840 - DNA, 80 bp, synthetic construct; identical to SEQ ID NO: 44196
  source 1..80: mol_type = other DNA

SEQ ID NO: 77841 - DNA, 80 bp, synthetic construct; identical to SEQ ID NO: 44197
  source 1..80: mol_type = other DNA

SEQ ID NO: 77842 - DNA, 80 bp, synthetic construct; identical to SEQ ID NO: 14919
  source 1..80: mol_type = other DNA

SEQ ID NO: 77843 - DNA, 80 bp, synthetic construct; identical to SEQ ID NO: 44199
  source 1..80: mol_type = other DNA

SEQ ID NO: 77844 - DNA, 80 bp, synthetic construct; identical to SEQ ID NO: 44200
  source 1..80: mol_type = other DNA

SEQ ID NO: 77845 - DNA, 80 bp, synthetic construct; identical to SEQ ID NO: 44201
  source 1..80: mol_type = other DNA

SEQ ID NO: 77846 - DNA, 80 bp, synthetic construct; identical to SEQ ID NO: 14920
  source 1..80: mol_type = other DNA

SEQ ID NO: 77847 - DNA, 80 bp, synthetic construct; identical to SEQ ID NO: 44203
  source 1..80: mol_type = other DNA

SEQ ID NO: 77848 - DNA, 80 bp, synthetic construct; identical to SEQ ID NO: 44204
  source 1..80: mol_type = other DNA

SEQ ID NO: 77849 - DNA, 80 bp, synthetic construct; identical to SEQ ID NO: 44205
  source 1..80: mol_type = other DNA

SEQ ID NO: 77850 - DNA, 80 bp, synthetic construct; identical to SEQ ID NO: 44206
  source 1..80: mol_type = other DNA

SEQ ID NO: 77851 - DNA, 80 bp, synthetic construct; identical to SEQ ID NO: 14921
  source 1..80: mol_type = other DNA

SEQ ID NO: 77852 - DNA, 80 bp, synthetic construct; identical to SEQ ID NO: 44208
  source 1..80: mol_type = other DNA

SEQ ID NO: 77853 - DNA, 80 bp, synthetic construct; identical to SEQ ID NO: 44209
  source 1..80: mol_type = other DNA

SEQ ID NO: 77854 - DNA, 80 bp, synthetic construct; identical to SEQ ID NO: 14922
  source 1..80: mol_type = other DNA

SEQ ID NO: 77855 - DNA, 80 bp, synthetic construct; identical to SEQ ID NO: 44211
  source 1..80: mol_type = other DNA

SEQ ID NO: 77856 - DNA, 80 bp, synthetic construct; identical to SEQ ID NO: 44212
  source 1..80: mol_type = other DNA

SEQ ID NO: 77857 - DNA, 80 bp, synthetic construct; identical to SEQ ID NO: 44213
  source 1..80: mol_type = other DNA

SEQ ID NO: 77858 - DNA, 80 bp, synthetic construct; identical to SEQ ID NO: 44214
  source 1..80: mol_type = other DNA

SEQ ID NO: 77859 - DNA, 80 bp, synthetic construct; identical to SEQ ID NO: 14923
  source 1..80: mol_type = other DNA

SEQ ID NO: 77860 - DNA, 80 bp, synthetic construct; identical to SEQ ID NO: 44216
  source 1..80: mol_type = other DNA

SEQ ID NO: 77861 - DNA, 80 bp, synthetic construct; identical to SEQ ID NO: 44217
  source 1..80: mol_type = other DNA

SEQ ID NO: 77862 - DNA, 80 bp, synthetic construct; identical to SEQ ID NO: 14924
  source 1..80: mol_type = other DNA

SEQ ID NO: 77863 - DNA, 80 bp, synthetic construct; identical to SEQ ID NO: 44219
  source 1..80: mol_type = other DNA

SEQ ID NO: 77864 - DNA, 80 bp, synthetic construct; identical to SEQ ID NO: 44220
  source 1..80: mol_type = other DNA

SEQ ID NO: 77865 - DNA, 80 bp, synthetic construct; identical to SEQ ID NO: 44221
  source 1..80: mol_type = other DNA

SEQ ID NO: 77866 - DNA, 80 bp, synthetic construct; identical to SEQ ID NO: 44222
  source 1..80: mol_type = other DNA

SEQ ID NO: 77867 - DNA, 80 bp, synthetic construct; identical to SEQ ID NO: 14925
  source 1..80: mol_type = other DNA

SEQ ID NO: 77868 - DNA, 80 bp, synthetic construct; identical to SEQ ID NO: 44224
  source 1..80: mol_type = other DNA

SEQ ID NO: 77869 - DNA, 80 bp, synthetic construct; identical to SEQ ID NO: 44225
  source 1..80: mol_type = other DNA

SEQ ID NO: 77870 - DNA, 80 bp, synthetic construct; identical to SEQ ID NO: 14926
  source 1..80: mol_type = other DNA

SEQ ID NO: 77871 - DNA, 80 bp, synthetic construct; identical to SEQ ID NO: 44227
  source 1..80: mol_type = other DNA

SEQ ID NO: 77872 - DNA, 80 bp, synthetic construct; identical to SEQ ID NO: 44228
  source 1..80: mol_type = other DNA

SEQ ID NO: 77873 - DNA, 80 bp, synthetic construct; identical to SEQ ID NO: 44229
  source 1..80: mol_type = other DNA

SEQ ID NO: 77874 - DNA, 80 bp, synthetic construct; identical to SEQ ID NO: 44230
  source 1..80: mol_type = other DNA

SEQ ID NO: 77875 - DNA, 80 bp, synthetic construct; identical to SEQ ID NO: 44231
  source 1..80: mol_type = other DNA

SEQ ID NO: 77876 - DNA, 80 bp, synthetic construct; identical to SEQ ID NO: 44232
  source 1..80: mol_type = other DNA

SEQ ID NO: 77877 - DNA, 80 bp, synthetic construct; identical to SEQ ID NO: 44233
  source 1..80: mol_type = other DNA

SEQ ID NO: 77878 - DNA, 80 bp, synthetic construct; identical to SEQ ID NO: 44234
  source 1..80: mol_type = other DNA

SEQ ID NO: 77879 - DNA, 80 bp, synthetic construct; identical to SEQ ID NO: 14927
  source 1..80: mol_type = other DNA

SEQ ID NO: 77880 - DNA, 80 bp, synthetic construct; identical to SEQ ID NO: 44236
  source 1..80: mol_type = other DNA

SEQ ID NO: 77881 - DNA, 80 bp, synthetic construct; identical to SEQ ID NO: 44237
  source 1..80: mol_type = other DNA

SEQ ID NO: 77882 - DNA, 80 bp, synthetic construct; identical to SEQ ID NO: 44238
  source 1..80: mol_type = other DNA

SEQ ID NO: 77883 - DNA, 80 bp, synthetic construct; identical to SEQ ID NO: 14928
  source 1..80: mol_type = other DNA

SEQ ID NO: 77884 - DNA, 80 bp, synthetic construct; identical to SEQ ID NO: 44240
  source 1..80: mol_type = other DNA

SEQ ID NO: 77885 - DNA, 80 bp, synthetic construct; identical to SEQ ID NO: 44241
  source 1..80: mol_type = other DNA

SEQ ID NO: 77886 - DNA, 80 bp, synthetic construct; identical to SEQ ID NO: 44242
  source 1..80: mol_type = other DNA

SEQ ID NO: 77887 - DNA, 80 bp, synthetic construct; identical to SEQ ID NO: 44243
  source 1..80: mol_type = other DNA

SEQ ID NO: 77888 - DNA, 80 bp, synthetic construct; identical to SEQ ID NO: 14929
  source 1..80: mol_type = other DNA

SEQ ID NO: 77889 - DNA, 80 bp, synthetic construct; identical to SEQ ID NO: 44246
  source 1..80: mol_type = other DNA

SEQ ID NO: 77890 - DNA, 80 bp, synthetic construct; identical to SEQ ID NO: 44247
  source 1..80: mol_type = other DNA

SEQ ID NO: 77891 - DNA, 80 bp, synthetic construct; identical to SEQ ID NO: 14930
  source 1..80: mol_type = other DNA

SEQ ID NO: 77892 - DNA, 80 bp, synthetic construct; identical to SEQ ID NO: 44249
  source 1..80: mol_type = other DNA

SEQ ID NO: 77893 - DNA, 80 bp, synthetic construct; identical to SEQ ID NO: 44250
  source 1..80: mol_type = other DNA

SEQ ID NO: 77894 - DNA, 80 bp, synthetic construct; identical to SEQ ID NO: 14931
  source 1..80: mol_type = other DNA

SEQ ID NO: 77895 - DNA, 80 bp, synthetic construct; identical to SEQ ID NO: 44252
  source 1..80: mol_type = other DNA

SEQ ID NO: 77896 - DNA, 80 bp, synthetic construct; identical to SEQ ID NO: 44253
  source 1..80: mol_type = other DNA

SEQ ID NO: 77897 - DNA, 80 bp, synthetic construct; identical to SEQ ID NO: 44254
  source 1..80: mol_type = other DNA

SEQ ID NO: 77898 - DNA, 80 bp, synthetic construct; identical to SEQ ID NO: 14932
  source 1..80: mol_type = other DNA

SEQ ID NO: 77899 - DNA, 80 bp, synthetic construct; identical to SEQ ID NO: 44256
  source 1..80: mol_type = other DNA

SEQ ID NO: 77900 - DNA, 80 bp, synthetic construct; identical to SEQ ID NO: 44257
  source 1..80: mol_type = other DNA

SEQ ID NO: 77901 - DNA, 80 bp, synthetic construct; identical to SEQ ID NO: 44258
  source 1..80: mol_type = other DNA

SEQ ID NO: 77902 - DNA, 80 bp, synthetic construct; identical to SEQ ID NO: 44259
  source 1..80: mol_type = other DNA

SEQ ID NO: 77903 - DNA, 80 bp, synthetic construct; identical to SEQ ID NO: 14933
  source 1..80: mol_type = other DNA

SEQ ID NO: 77904 - DNA, 80 bp, synthetic construct; identical to SEQ ID NO: 44261
  source 1..80: mol_type = other DNA

SEQ ID NO: 77905 - DNA, 80 bp, synthetic construct; identical to SEQ ID NO: 44262
  source 1..80: mol_type = other DNA

SEQ ID NO: 77906 - DNA, 80 bp, synthetic construct; identical to SEQ ID NO: 44263
  source 1..80: mol_type = other DNA

SEQ ID NO: 77907 - DNA, 80 bp, synthetic construct; identical to SEQ ID NO: 14934
  source 1..80: mol_type = other DNA

SEQ ID NO: 77908 - DNA, 80 bp, synthetic construct; identical to SEQ ID NO: 44265
  source 1..80: mol_type = other DNA

SEQ ID NO: 77909 - DNA, 80 bp, synthetic construct; identical to SEQ ID NO: 44266
  source 1..80: mol_type = other DNA

SEQ ID NO: 77910 - DNA, 80 bp, synthetic construct; identical to SEQ ID NO: 44267
  source 1..80: mol_type = other DNA

SEQ ID NO: 77911 - DNA, 80 bp, synthetic construct; identical to SEQ ID NO: 14935
  source 1..80: mol_type = other DNA

SEQ ID NO: 77912 - DNA, 80 bp, synthetic construct; identical to SEQ ID NO: 44270
  source 1..80: mol_type = other DNA

SEQ ID NO: 77913 - DNA, 80 bp, synthetic construct; identical to SEQ ID NO: 44271
  source 1..80: mol_type = other DNA

SEQ ID NO: 77914 - DNA, 80 bp, synthetic construct; identical to SEQ ID NO: 14936
  source 1..80: mol_type = other DNA

SEQ ID NO: 77915 - DNA, 80 bp, synthetic construct; identical to SEQ ID NO: 44273
  source 1..80: mol_type = other DNA

SEQ ID NO: 77916 - DNA, 80 bp, synthetic construct; identical to SEQ ID NO: 44274
  source 1..80: mol_type = other DNA

SEQ ID NO: 77917 - DNA, 80 bp, synthetic construct; identical to SEQ ID NO: 44275
  source 1..80: mol_type = other DNA

SEQ ID NO: 77918 - DNA, 80 bp, synthetic construct; identical to SEQ ID NO: 14937
  source 1..80: mol_type = other DNA

SEQ ID NO: 77919 - DNA, 80 bp, synthetic construct; identical to SEQ ID NO: 44277
  source 1..80: mol_type = other DNA

SEQ ID NO: 77920 - DNA, 80 bp, synthetic construct; identical to SEQ ID NO: 44278
  source 1..80: mol_type = other DNA

SEQ ID NO: 77921 - DNA, 80 bp, synthetic construct; identical to SEQ ID NO: 44279
  source 1..80: mol_type = other DNA

SEQ ID NO: 77922 - DNA, 80 bp, synthetic construct; identical to SEQ ID NO: 44280
  source 1..80: mol_type = other DNA

SEQ ID NO: 77923 - DNA, 80 bp, synthetic construct; identical to SEQ ID NO: 14938
  source 1..80: mol_type = other DNA

SEQ ID NO: 77924 - DNA, 80 bp, synthetic construct; identical to SEQ ID NO: 44282
  source 1..80: mol_type = other DNA

SEQ ID NO: 77925 - DNA, 80 bp, synthetic construct; identical to SEQ ID NO: 44283
  source 1..80: mol_type = other DNA

SEQ ID NO: 77926 - DNA, 80 bp, synthetic construct; identical to SEQ ID NO: 44284
  source 1..80: mol_type = other DNA

SEQ ID NO: 77927 - DNA, 80 bp, synthetic construct; identical to SEQ ID NO: 14939
  source 1..80: mol_type = other DNA

SEQ ID NO: 77928 - DNA, 80 bp, synthetic construct; identical to SEQ ID NO: 44286
  source 1..80: mol_type = other DNA

SEQ ID NO: 77929 - DNA, 80 bp, synthetic construct; identical to SEQ ID NO: 44287
  source 1..80: mol_type = other DNA

SEQ ID NO: 77930 - DNA, 80 bp, synthetic construct; identical to SEQ ID NO: 44288
  source 1..80: mol_type = other DNA

SEQ ID NO: 77931 - DNA, 80 bp, synthetic construct; identical to SEQ ID NO: 44289
  source 1..80: mol_type = other DNA

SEQ ID NO: 77932 - DNA, 80 bp, synthetic construct; identical to SEQ ID NO: 14940
  source 1..80: mol_type = other DNA

SEQ ID NO: 77933 - DNA, 80 bp, synthetic construct; identical to SEQ ID NO: 44291
  source 1..80: mol_type = other DNA

SEQ ID NO: 77934 - DNA, 80 bp, synthetic construct; identical to SEQ ID NO: 44292
  source 1..80: mol_type = other DNA

SEQ ID NO: 77935 - DNA, 80 bp, synthetic construct; identical to SEQ ID NO: 44293
  source 1..80: mol_type = other DNA

SEQ ID NO: 77936 - DNA, 80 bp, synthetic construct; identical to SEQ ID NO: 14941
  source 1..80: mol_type = other DNA

SEQ ID NO: 77937 - DNA, 80 bp, synthetic construct; identical to SEQ ID NO: 44295
  source 1..80: mol_type = other DNA

SEQ ID NO: 77938 - DNA, 80 bp, synthetic construct; identical to SEQ ID NO: 44296
  source 1..80: mol_type = other DNA

SEQ ID NO: 77939 - DNA, 80 bp, synthetic construct; identical to SEQ ID NO: 14942
  source 1..80: mol_type = other DNA

SEQ ID NO: 77940 - DNA, 80 bp, synthetic construct; identical to SEQ ID NO: 44298
  source 1..80: mol_type = other DNA

SEQ ID NO: 77941 - DNA, 80 bp, synthetic construct; identical to SEQ ID NO: 44299
  source 1..80: mol_type = other DNA

SEQ ID NO: 77942 - DNA, 80 bp, synthetic construct; identical to SEQ ID NO: 44300
  source 1..80: mol_type = other DNA

SEQ ID NO: 77943 - DNA, 80 bp, synthetic construct; identical to SEQ ID NO: 14943
  source 1..80: mol_type = other DNA

SEQ ID NO: 77944 - DNA, 80 bp, synthetic construct; identical to SEQ ID NO: 44302
  source 1..80: mol_type = other DNA

SEQ ID NO: 77945 - DNA, 80 bp, synthetic construct; identical to SEQ ID NO: 44303
  source 1..80: mol_type = other DNA

SEQ ID NO: 77946 - DNA, 80 bp, synthetic construct; identical to SEQ ID NO: 44304
  source 1..80: mol_type = other DNA

SEQ ID NO: 77947 - DNA, 80 bp, synthetic construct; identical to SEQ ID NO: 14944
  source 1..80: mol_type = other DNA

SEQ ID NO: 77948 - DNA, 80 bp, synthetic construct; identical to SEQ ID NO: 44306
  source 1..80: mol_type = other DNA

SEQ ID NO: 77949 - DNA, 80 bp, synthetic construct; identical to SEQ ID NO: 44307
  source 1..80: mol_type = other DNA

SEQ ID NO: 77950 - DNA, 80 bp, synthetic construct; identical to SEQ ID NO: 44308
  source 1..80: mol_type = other DNA

SEQ ID NO: 77951 - DNA, 80 bp, synthetic construct; identical to SEQ ID NO: 14945
  source 1..80: mol_type = other DNA

SEQ ID NO: 77952 - DNA, 80 bp, synthetic construct; identical to SEQ ID NO: 44310
  source 1..80: mol_type = other DNA

SEQ ID NO: 77953 - DNA, 80 bp, synthetic construct; identical to SEQ ID NO: 44311
  source 1..80: mol_type = other DNA

SEQ ID NO: 77954 - DNA, 80 bp, synthetic construct; identical to SEQ ID NO: 44312
  source 1..80: mol_type = other DNA

SEQ ID NO: 77955 - DNA, 80 bp, synthetic construct; identical to SEQ ID NO: 14946
  source 1..80: mol_type = other DNA

SEQ ID NO: 77956 - DNA, 80 bp, synthetic construct; identical to SEQ ID NO: 44314
  source 1..80: mol_type = other DNA

SEQ ID NO: 77957 - DNA, 80 bp, synthetic construct; identical to SEQ ID NO: 44315
  source 1..80: mol_type = other DNA

SEQ ID NO: 77958 - DNA, 80 bp, synthetic construct; identical to SEQ ID NO: 44316
  source 1..80: mol_type = other DNA

SEQ ID NO: 77959 - DNA, 80 bp, synthetic construct; identical to SEQ ID NO: 44317
  source 1..80: mol_type = other DNA

SEQ ID NO: 77960 - DNA, 80 bp, synthetic construct; identical to SEQ ID NO: 44318
  source 1..80: mol_type = other DNA

SEQ ID NO: 77961 - DNA, 80 bp, synthetic construct; identical to SEQ ID NO: 44319
  source 1..80: mol_type = other DNA

SEQ ID NO: 77962 - DNA, 80 bp, synthetic construct; identical to SEQ ID NO: 44320
  source 1..80: mol_type = other DNA

SEQ ID NO: 77963 - DNA, 80 bp, synthetic construct; identical to SEQ ID NO: 14947
  source 1..80: mol_type = other DNA

SEQ ID NO: 77964 - DNA, 80 bp, synthetic construct; identical to SEQ ID NO: 44322
  source 1..80: mol_type = other DNA

SEQ ID NO: 77965 - DNA, 80 bp, synthetic construct; identical to SEQ ID NO: 44323
  source 1..80: mol_type = other DNA

SEQ ID NO: 77966 - DNA, 80 bp, synthetic construct; identical to SEQ ID NO: 44324
  source 1..80: mol_type = other DNA

SEQ ID NO: 77967 - DNA, 80 bp, synthetic construct; identical to SEQ ID NO: 44325
  source 1..80: mol_type = other DNA

SEQ ID NO: 77968 - DNA, 80 bp, synthetic construct; identical to SEQ ID NO: 14948
  source 1..80: mol_type = other DNA

SEQ ID NO: 77969 - DNA, 80 bp, synthetic construct; identical to SEQ ID NO: 44327
  source 1..80: mol_type = other DNA

SEQ ID NO: 77970 - DNA, 80 bp, synthetic construct; identical to SEQ ID NO: 44328
  source 1..80: mol_type = other DNA

SEQ ID NO: 77971 - DNA, 80 bp, synthetic construct; identical to SEQ ID NO: 44329
  source 1..80: mol_type = other DNA

SEQ ID NO: 77972 - DNA, 80 bp, synthetic construct; identical to SEQ ID NO: 14949
  source 1..80: mol_type = other DNA

SEQ ID NO: 77973 - DNA, 80 bp, synthetic construct; identical to SEQ ID NO: 44332
  source 1..80: mol_type = other DNA

SEQ ID NO: 77974 - DNA, 80 bp, synthetic construct; identical to SEQ ID NO: 44333
  source 1..80: mol_type = other DNA

SEQ ID NO: 77975 - DNA, 80 bp, synthetic construct; identical to SEQ ID NO: 44334
  source 1..80: mol_type = other DNA

SEQ ID NO: 77976 - DNA, 80 bp, synthetic construct; identical to SEQ ID NO: 14950
  source 1..80: mol_type = other DNA

SEQ ID NO: 77977 - DNA, 80 bp, synthetic construct; identical to SEQ ID NO: 44336
  source 1..80: mol_type = other DNA

SEQ ID NO: 77978 - DNA, 80 bp, synthetic construct; identical to SEQ ID NO: 44337
  source 1..80: mol_type = other DNA

SEQ ID NO: 77979 - DNA, 80 bp, synthetic construct; identical to SEQ ID NO: 14951
  source 1..80: mol_type = other DNA

SEQ ID NO: 77980 - DNA, 80 bp, synthetic construct; identical to SEQ ID NO: 44339
  source 1..80: mol_type = other DNA

SEQ ID NO: 77981 - DNA, 80 bp, synthetic construct; identical to SEQ ID NO: 44340
  source 1..80: mol_type = other DNA

SEQ ID NO: 77982 - DNA, 80 bp, synthetic construct; identical to SEQ ID NO: 44341
  source 1..80: mol_type = other DNA

SEQ ID NO: 77983 - DNA, 80 bp, synthetic construct; identical to SEQ ID NO: 14952
  source 1..80: mol_type = other DNA

SEQ ID NO: 77984 - DNA, 80 bp, synthetic construct; identical to SEQ ID NO: 44343
  source 1..80: mol_type = other DNA

SEQ ID NO: 77985 - DNA, 80 bp, synthetic construct; identical to SEQ ID NO: 44344
  source 1..80: mol_type = other DNA

SEQ ID NO: 77986 - DNA, 80 bp, synthetic construct; identical to SEQ ID NO: 44345
  source 1..80: mol_type = other DNA

SEQ ID NO: 77987 - DNA, 80 bp, synthetic construct; identical to SEQ ID NO: 14953
  source 1..80: mol_type = other DNA

SEQ ID NO: 77988 - DNA, 80 bp, synthetic construct; identical to SEQ ID NO: 44347
  source 1..80: mol_type = other DNA

SEQ ID NO: 77989 - DNA, 80 bp, synthetic construct; identical to SEQ ID NO: 44348
  source 1..80: mol_type = other DNA

SEQ ID NO: 77990 - DNA, 80 bp, synthetic construct; identical to SEQ ID NO: 44349
  source 1..80: mol_type = other DNA

SEQ ID NO: 77991 - DNA, 80 bp, synthetic construct; identical to SEQ ID NO: 14954
  source 1..80: mol_type = other DNA

SEQ ID NO: 77992 - DNA, 80 bp, synthetic construct; identical to SEQ ID NO: 44351
  source 1..80: mol_type = other DNA

SEQ ID NO: 77993 - DNA, 80 bp, synthetic construct; identical to SEQ ID NO: 44352
  source 1..80: mol_type = other DNA

SEQ ID NO: 77994 - DNA, 80 bp, synthetic construct; identical to SEQ ID NO: 44353
  source 1..80: mol_type = other DNA

SEQ ID NO: 77995 - DNA, 80 bp, synthetic construct; identical to SEQ ID NO: 14955
  source 1..80: mol_type = other DNA

SEQ ID NO: 77996 - DNA, 80 bp, synthetic construct; identical to SEQ ID NO: 44355
  source 1..80: mol_type = other DNA

SEQ ID NO: 77997 - DNA, 80 bp, synthetic construct; identical to SEQ ID NO: 44356
  source 1..80: mol_type = other DNA

SEQ ID NO: 77998 - DNA, 80 bp, synthetic construct; identical to SEQ ID NO: 44357
  source 1..80: mol_type = other DNA

SEQ ID NO: 77999 - DNA, 80 bp, synthetic construct; identical to SEQ ID NO: 14956
  source 1..80: mol_type = other DNA

SEQ ID NO: 78000 - DNA, 80 bp, synthetic construct; identical to SEQ ID NO: 44359
  source 1..80: mol_type = other DNA

SEQ ID NO: 78001 - DNA, 80 bp, synthetic construct; identical to SEQ ID NO: 44360
  source 1..80: mol_type = other DNA

SEQ ID NO: 78002 - DNA, 80 bp, synthetic construct; identical to SEQ ID NO: 44361
  source 1..80: mol_type = other DNA

SEQ ID NO: 78003 - DNA, 80 bp, synthetic construct; identical to SEQ ID NO: 44362
  source 1..80: mol_type = other DNA

SEQ ID NO: 78004 - DNA, 80 bp, synthetic construct; identical to SEQ ID NO: 44363
  source 1..80: mol_type = other DNA

SEQ ID NO: 78005 - DNA, 80 bp, synthetic construct; identical to SEQ ID NO: 14957
  source 1..80: mol_type = other DNA

SEQ ID NO: 78006 - DNA, 80 bp, synthetic construct; identical to SEQ ID NO: 44365
  source 1..80: mol_type = other DNA

SEQ ID NO: 78007 - DNA, 80 bp, synthetic construct; identical to SEQ ID NO: 44366
  source 1..80: mol_type = other DNA

SEQ ID NO: 78008 - DNA, 80 bp, synthetic construct; identical to SEQ ID NO: 44367
  source 1..80: mol_type = other DNA

SEQ ID NO: 78009 - DNA, 80 bp, synthetic construct; identical to SEQ ID NO: 14958
  source 1..80: mol_type = other DNA

SEQ ID NO: 78010 - DNA, 80 bp, synthetic construct; identical to SEQ ID NO: 44369
  source 1..80: mol_type = other DNA

SEQ ID NO: 78011 - DNA, 80 bp, synthetic construct; identical to SEQ ID NO: 44370
  source 1..80: mol_type = other DNA

SEQ ID NO: 78012 - DNA, 80 bp, synthetic construct; identical to SEQ ID NO: 44371
  source 1..80: mol_type = other DNA

SEQ ID NO: 78013 - DNA, 80 bp, synthetic construct; identical to SEQ ID NO: 44372
  source 1..80: mol_type = other DNA

SEQ ID NO: 78014 - DNA, 80 bp, synthetic construct; identical to SEQ ID NO: 14959
  source 1..80: mol_type = other DNA

SEQ ID NO: 78015 - DNA, 80 bp, synthetic construct; identical to SEQ ID NO: 44374
  source 1..80: mol_type = other DNA

SEQ ID NO: 78016 - DNA, 80 bp, synthetic construct; identical to SEQ ID NO: 44375
  source 1..80: mol_type = other DNA

SEQ ID NO: 78017 - DNA, 80 bp, synthetic construct; identical to SEQ ID NO: 14960
  source 1..80: mol_type = other DNA

SEQ ID NO: 78018 - DNA, 80 bp, synthetic construct; identical to SEQ ID NO: 44377
  source 1..80: mol_type = other DNA

SEQ ID NO: 78019 - DNA, 80 bp, synthetic construct; identical to SEQ ID NO: 44378
  source 1..80: mol_type = other DNA

SEQ ID NO: 78020 - DNA, 80 bp, synthetic construct; identical to SEQ ID NO: 44379
  source 1..80: mol_type = other DNA

SEQ ID NO: 78021 - DNA, 80 bp, synthetic construct; identical to SEQ ID NO: 14961
  source 1..80: mol_type = other DNA

SEQ ID NO: 78022 - DNA, 80 bp, synthetic construct; identical to SEQ ID NO: 44381
  source 1..80: mol_type = other DNA

SEQ ID NO: 78023 - DNA, 80 bp, synthetic construct; identical to SEQ ID NO: 44382
  source 1..80: mol_type = other DNA

SEQ ID NO: 78024 - DNA, 80 bp, synthetic construct; identical to SEQ ID NO: 44383
  source 1..80: mol_type = other DNA

SEQ ID NO: 78025 - DNA, 80 bp, synthetic construct; identical to SEQ ID NO: 14962
  source 1..80: mol_type = other DNA

SEQ ID NO: 78026 - DNA, 80 bp, synthetic construct; identical to SEQ ID NO: 44385
  source 1..80: mol_type = other DNA

SEQ ID NO: 78027 - DNA, 80 bp, synthetic construct; identical to SEQ ID NO: 44386
  source 1..80: mol_type = other DNA

SEQ ID NO: 78028 - DNA, 80 bp, synthetic construct; identical to SEQ ID NO: 44387
  source 1..80: mol_type = other DNA

SEQ ID NO: 78029 - DNA, 80 bp, synthetic construct; identical to SEQ ID NO: 14963
  source 1..80: mol_type = other DNA

SEQ ID NO: 78030 - DNA, 80 bp, synthetic construct; identical to SEQ ID NO: 44389
  source 1..80: mol_type = other DNA

SEQ ID NO: 78031 - DNA, 80 bp, synthetic construct; identical to SEQ ID NO: 44390
  source 1..80: mol_type = other DNA

SEQ ID NO: 78032 - DNA, 80 bp, synthetic construct; identical to SEQ ID NO: 44391
  source 1..80: mol_type = other DNA

SEQ ID NO: 78033 - DNA, 80 bp, synthetic construct; identical to SEQ ID NO: 44392
  source 1..80: mol_type = other DNA

SEQ ID NO: 78034 - DNA, 80 bp, synthetic construct; identical to SEQ ID NO: 14964
  source 1..80: mol_type = other DNA

SEQ ID NO: 78035 - DNA, 80 bp, synthetic construct; identical to SEQ ID NO: 44394
  source 1..80: mol_type = other DNA

SEQ ID NO: 78036 - DNA, 80 bp, synthetic construct; identical to SEQ ID NO: 44395
  source 1..80: mol_type = other DNA

SEQ ID NO: 78037 - DNA, 80 bp, synthetic construct; identical to SEQ ID NO: 44396
  source 1..80: mol_type = other DNA

SEQ ID NO: 78038 - DNA, 80 bp, synthetic construct; identical to SEQ ID NO: 14965
  source 1..80: mol_type = other DNA

SEQ ID NO: 78039 - DNA, 80 bp, synthetic construct; identical to SEQ ID NO: 44398
  source 1..80: mol_type = other DNA

SEQ ID NO: 78040 - DNA, 80 bp, synthetic construct; identical to SEQ ID NO: 44399
  source 1..80: mol_type = other DNA

SEQ ID NO: 78041 - DNA, 80 bp, synthetic construct; identical to SEQ ID NO: 14966
  source 1..80: mol_type = other DNA

SEQ ID NO: 78042 - DNA, 80 bp, synthetic construct; identical to SEQ ID NO: 44401
  source 1..80: mol_type = other DNA

SEQ ID NO: 78043 - DNA, 80 bp, synthetic construct; identical to SEQ ID NO: 44402
  source 1..80: mol_type = other DNA

SEQ ID NO: 78044 - DNA, 80 bp, synthetic construct; identical to SEQ ID NO: 44403
  source 1..80: mol_type = other DNA

SEQ ID NO: 78045 - DNA, 80 bp, synthetic construct; identical to SEQ ID NO: 14967
  source 1..80: mol_type = other DNA

SEQ ID NO: 78046 - DNA, 80 bp, synthetic construct; identical to SEQ ID NO: 44405
  source 1..80: mol_type = other DNA

SEQ ID NO: 78047 - DNA, 80 bp, synthetic construct; identical to SEQ ID NO: 44406
  source 1..80: mol_type = other DNA

SEQ ID NO: 78048 - DNA, 80 bp, synthetic construct; identical to SEQ ID NO: 44407
  source 1..80: mol_type = other DNA

SEQ ID NO: 78049 - DNA, 80 bp, synthetic construct; identical to SEQ ID NO: 14968
  source 1..80: mol_type = other DNA

SEQ ID NO: 78050 - DNA, 80 bp, synthetic construct; identical to SEQ ID NO: 44409
  source 1..80: mol_type = other DNA

SEQ ID NO: 78051 - DNA, 80 bp, synthetic construct; identical to SEQ ID NO: 44410
  source 1..80: mol_type = other DNA

SEQ ID NO: 78052 - DNA, 80 bp, synthetic construct; identical to SEQ ID NO: 44411
  source 1..80: mol_type = other DNA

SEQ ID NO: 78053 - DNA, 80 bp, synthetic construct; identical to SEQ ID NO: 14969
  source 1..80: mol_type = other DNA

SEQ ID NO: 78054 - DNA, 80 bp, synthetic construct; identical to SEQ ID NO: 44413
  source 1..80: mol_type = other DNA

SEQ ID NO: 78055 - DNA, 80 bp, synthetic construct; identical to SEQ ID NO: 44414
  source 1..80: mol_type = other DNA

SEQ ID NO: 78056 - DNA, 80 bp, synthetic construct; identical to SEQ ID NO: 44415
  source 1..80: mol_type = other DNA

SEQ ID NO: 78057 - DNA, 80 bp, synthetic construct; identical to SEQ ID NO: 14970
  source 1..80: mol_type = other DNA

SEQ ID NO: 78058 - DNA, 80 bp, synthetic construct; identical to SEQ ID NO: 44417
  source 1..80: mol_type = other DNA

SEQ ID NO: 78059 - DNA, 80 bp, synthetic construct; identical to SEQ ID NO: 44418
  source 1..80: mol_type = other DNA

SEQ ID NO: 78060 - DNA, 80 bp, synthetic construct; identical to SEQ ID NO: 14971
  source 1..80: mol_type = other DNA

SEQ ID NO: 78061 - DNA, 80 bp, synthetic construct; identical to SEQ ID NO: 44421
  source 1..80: mol_type = other DNA

SEQ ID NO: 78062 - DNA, 80 bp, synthetic construct; identical to SEQ ID NO: 44422
  source 1..80: mol_type = other DNA

SEQ ID NO: 78063 - DNA, 80 bp, synthetic construct; identical to SEQ ID NO: 14972
  source 1..80: mol_type = other DNA

SEQ ID NO: 78064 - DNA, 80 bp, synthetic construct; identical to SEQ ID NO: 44424
  source 1..80: mol_type = other DNA

SEQ ID NO: 78065 - DNA, 80 bp, synthetic construct; identical to SEQ ID NO: 44425
  source 1..80: mol_type = other DNA

SEQ ID NO: 78066 - DNA, 80 bp, synthetic construct; identical to SEQ ID NO: 44426
  source 1..80: mol_type = other DNA

SEQ ID NO: 78067 - DNA, 80 bp, synthetic construct; identical to SEQ ID NO: 44427
  source 1..80: mol_type = other DNA

SEQ ID NO: 78068 - DNA, 80 bp, synthetic construct; identical to SEQ ID NO: 14973
  source 1..80: mol_type = other DNA

SEQ ID NO: 78069 - DNA, 80 bp, synthetic construct; identical to SEQ ID NO: 44429
  source 1..80: mol_type = other DNA

SEQ ID NO: 78070 - DNA, 80 bp, synthetic construct; identical to SEQ ID NO: 44430
  source 1..80: mol_type = other DNA

SEQ ID NO: 78071 - DNA, 80 bp, synthetic construct; identical to SEQ ID NO: 44431
  source 1..80: mol_type = other DNA

SEQ ID NO: 78072 - DNA, 80 bp, synthetic construct; identical to SEQ ID NO: 14974
  source 1..80: mol_type = other DNA

SEQ ID NO: 78073 - DNA, 80 bp, synthetic construct; identical to SEQ ID NO: 44433
  source 1..80: mol_type = other DNA

SEQ ID NO: 78074 - DNA, 80 bp, synthetic construct; identical to SEQ ID NO: 44434
  source 1..80: mol_type = other DNA

SEQ ID NO: 78075 - DNA, 80 bp, synthetic construct; identical to SEQ ID NO: 44435
  source 1..80: mol_type = other DNA

SEQ ID NO: 78076 - DNA, 80 bp, synthetic construct; identical to SEQ ID NO: 44436
  source 1..80: mol_type = other DNA

SEQ ID NO: 78077 - DNA, 80 bp, synthetic construct; identical to SEQ ID NO: 14975
  source 1..80: mol_type = other DNA

SEQ ID NO: 78078 - DNA, 80 bp, synthetic construct; identical to SEQ ID NO: 44438
  source 1..80: mol_type = other DNA

SEQ ID NO: 78079 - DNA, 80 bp, synthetic construct; identical to SEQ ID NO: 44439
  source 1..80: mol_type = other DNA

SEQ ID NO: 78080 - DNA, 80 bp, synthetic construct; identical to SEQ ID NO: 14976
  source 1..80: mol_type = other DNA

SEQ ID NO: 78081 - DNA, 80 bp, synthetic construct; identical to SEQ ID NO: 44441
  source 1..80: mol_type = other DNA

SEQ ID NO: 78082 - DNA, 80 bp, synthetic construct; identical to SEQ ID NO: 44442
  source 1..80: mol_type = other DNA

SEQ ID NO: 78083 - DNA, 80 bp, synthetic construct; identical to SEQ ID NO: 44443
  source 1..80: mol_type = other DNA

SEQ ID NO: 78084 - DNA, 80 bp, synthetic construct; identical to SEQ ID NO: 14977
  source 1..80: mol_type = other DNA

SEQ ID NO: 78085 - DNA, 80 bp, synthetic construct; identical to SEQ ID NO: 44445
  source 1..80: mol_type = other DNA

SEQ ID NO: 78086 - DNA, 80 bp, synthetic construct; identical to SEQ ID NO: 44447
  source 1..80: mol_type = other DNA

SEQ ID NO: 78087 - DNA, 80 bp, synthetic construct; identical to SEQ ID NO: 14978
  source 1..80: mol_type = other DNA

SEQ ID NO: 78088 - DNA, 80 bp, synthetic construct; identical to SEQ ID NO: 44449
  source 1..80: mol_type = other DNA

SEQ ID NO: 78089 - DNA, 80 bp, synthetic construct; identical to SEQ ID NO: 44450
  source 1..80: mol_type = other DNA

SEQ ID NO: 78090 - DNA, 80 bp, synthetic construct; identical to SEQ ID NO: 44451
  source 1..80: mol_type = other DNA

SEQ ID NO: 78091 - DNA, 80 bp, synthetic construct; identical to SEQ ID NO: 44452
  source 1..80: mol_type = other DNA

SEQ ID NO: 78092 - DNA, 80 bp, synthetic construct; identical to SEQ ID NO: 14979
  source 1..80: mol_type = other DNA

SEQ ID NO: 78093 - DNA, 80 bp, synthetic construct; identical to SEQ ID NO: 44454
  source 1..80: mol_type = other DNA

SEQ ID NO: 78094 - DNA, 80 bp, synthetic construct; identical to SEQ ID NO: 44455
  source 1..80: mol_type = other DNA

SEQ ID NO: 78095 - DNA, 80 bp, synthetic construct; identical to SEQ ID NO: 14980
  source 1..80: mol_type = other DNA

SEQ ID NO: 78096 - DNA, 80 bp, synthetic construct; identical to SEQ ID NO: 44457
  source 1..80: mol_type = other DNA

SEQ ID NO: 78097 - DNA, 80 bp, synthetic construct; identical to SEQ ID NO: 44458
  source 1..80: mol_type = other DNA

SEQ ID NO: 78098 - DNA, 80 bp, synthetic construct; identical to SEQ ID NO: 44459
  source 1..80: mol_type = other DNA

SEQ ID NO: 78099 - DNA, 80 bp, synthetic construct; identical to SEQ ID NO: 14981
  source 1..80: mol_type = other DNA

SEQ ID NO: 78100 - DNA, 80 bp, synthetic construct; identical to SEQ ID NO: 44462
  source 1..80: mol_type = other DNA

SEQ ID NO: 78101 - DNA, 80 bp, synthetic construct; identical to SEQ ID NO: 44463
  source 1..80: mol_type = other DNA

SEQ ID NO: 78102 - DNA, 80 bp, synthetic construct; identical to SEQ ID NO: 14982
  source 1..80: mol_type = other DNA

SEQ ID NO: 78103 - DNA, 80 bp, synthetic construct; identical to SEQ ID NO: 44465
  source 1..80: mol_type = other DNA

SEQ ID NO: 78104 - DNA, 80 bp, synthetic construct; identical to SEQ ID NO: 44466
  source 1..80: mol_type = other DNA

SEQ ID NO: 78105 - DNA, 80 bp, synthetic construct; identical to SEQ ID NO: 44467
  source 1..80: mol_type = other DNA

SEQ ID NO: 78106 - DNA, 80 bp, synthetic construct; identical to SEQ ID NO: 44468
  source 1..80: mol_type = other DNA

SEQ ID NO: 78107 - DNA, 80 bp, synthetic construct; identical to SEQ ID NO: 14983
  source 1..80: mol_type = other DNA

SEQ ID NO: 78108 - DNA, 80 bp, synthetic construct; identical to SEQ ID NO: 44470
  source 1..80: mol_type = other DNA

SEQ ID NO: 78109 - DNA, 80 bp, synthetic construct; identical to SEQ ID NO: 44471
  source 1..80: mol_type = other DNA

SEQ ID NO: 78110 - DNA, 80 bp, synthetic construct; identical to SEQ ID NO: 14984
  source 1..80: mol_type = other DNA

SEQ ID NO: 78111 - DNA, 80 bp, synthetic construct; identical to SEQ ID NO: 44473
  source 1..80: mol_type = other DNA

SEQ ID NO: 78112 - DNA, 80 bp, synthetic construct; identical to SEQ ID NO: 44474
  source 1..80: mol_type = other DNA

SEQ ID NO: 78113 - DNA, 80 bp, synthetic construct; identical to SEQ ID NO: 44475
  source 1..80: mol_type = other DNA

SEQ ID NO: 78114 - DNA, 80 bp, synthetic construct; identical to SEQ ID NO: 44476
  source 1..80: mol_type = other DNA

SEQ ID NO: 78115 - DNA, 80 bp, synthetic construct; identical to SEQ ID NO: 14985
  source 1..80: mol_type = other DNA

SEQ ID NO: 78116 - DNA, 80 bp, synthetic construct; identical to SEQ ID NO: 44478
  source 1..80: mol_type = other DNA

SEQ ID NO: 78117 - DNA, 80 bp, synthetic construct; identical to SEQ ID NO: 44479
  source 1..80: mol_type = other DNA

SEQ ID NO: 78118 - DNA, 80 bp, synthetic construct; identical to SEQ ID NO: 14986
  source 1..80: mol_type = other DNA

SEQ ID NO: 78119 - DNA, 80 bp, synthetic construct; identical to SEQ ID NO: 44481
  source 1..80: mol_type = other DNA

SEQ ID NO: 78120 - DNA, 80 bp, synthetic construct; identical to SEQ ID NO: 44482
  source 1..80: mol_type = other DNA

SEQ ID NO: 78121 - DNA, 80 bp, synthetic construct; identical to SEQ ID NO: 44483
  source 1..80: mol_type = other DNA

SEQ ID NO: 78122 - DNA, 80 bp, synthetic construct; identical to SEQ ID NO: 14987
  source 1..80: mol_type = other DNA

SEQ ID NO: 78123 - DNA, 80 bp, synthetic construct; identical to SEQ ID NO: 44485
  source 1..80: mol_type = other DNA

SEQ ID NO: 78124 - DNA, 80 bp, synthetic construct; identical to SEQ ID NO: 44486
  source 1..80: mol_type = other DNA

SEQ ID NO: 78125 - DNA, 80 bp, synthetic construct; identical to SEQ ID NO: 44487
  source 1..80: mol_type = other DNA

SEQ ID NO: 78126 - DNA, 80 bp, synthetic construct; identical to SEQ ID NO: 44488
  source 1..80: mol_type = other DNA

SEQ ID NO: 78127 - DNA, 80 bp, synthetic construct; identical to SEQ ID NO: 14988
  source 1..80: mol_type = other DNA

SEQ ID NO: 78128 - DNA, 80 bp, synthetic construct; identical to SEQ ID NO: 44490
  source 1..80: mol_type = other DNA

SEQ ID NO: 78129 - DNA, 80 bp, synthetic construct; identical to SEQ ID NO: 44491
  source 1..80: mol_type = other DNA

SEQ ID NO: 78130 - DNA, 80 bp, synthetic construct; identical to SEQ ID NO: 14989
  source 1..80: mol_type = other DNA

SEQ ID NO: 78131 - DNA, 80 bp, synthetic construct; identical to SEQ ID NO: 44493
  source 1..80: mol_type = other DNA

SEQ ID NO: 78132 - DNA, 80 bp, synthetic construct; identical to SEQ ID NO: 44494
  source 1..80: mol_type = other DNA

SEQ ID NO: 78133 - DNA, 80 bp, synthetic construct; identical to SEQ ID NO: 14990
  source 1..80: mol_type = other DNA

SEQ ID NO: 78134 - DNA, 80 bp, synthetic construct; identical to SEQ ID NO: 44496
  source 1..80: mol_type = other DNA

SEQ ID NO: 78135 - DNA, 80 bp, synthetic construct; identical to SEQ ID NO: 44497
  source 1..80: mol_type = other DNA

SEQ ID NO: 78136 - DNA, 80 bp, synthetic construct; identical to SEQ ID NO: 44498
  source 1..80: mol_type = other DNA

SEQ ID NO: 78137 - DNA, 80 bp, synthetic construct; identical to SEQ ID NO: 44499
  source 1..80: mol_type = other DNA

SEQ ID NO: 78138 - DNA, 80 bp, synthetic construct; identical to SEQ ID NO: 14991
  source 1..80: mol_type = other DNA

SEQ ID NO: 78139 - DNA, 80 bp, synthetic construct; identical to SEQ ID NO: 44501
  source 1..80: mol_type = other DNA

SEQ ID NO: 78140 - DNA, 80 bp, synthetic construct; identical to SEQ ID NO: 44502
  source 1..80: mol_type = other DNA

SEQ ID NO: 78141 - DNA, 80 bp, synthetic construct; identical to SEQ ID NO: 44503
  source 1..80: mol_type = other DNA

SEQ ID NO: 78142 - DNA, 80 bp, synthetic construct; identical to SEQ ID NO: 14992
  source 1..80: mol_type = other DNA

SEQ ID NO: 78143 - DNA, 80 bp, synthetic construct; identical to SEQ ID NO: 44505
  source 1..80: mol_type = other DNA

SEQ ID NO: 78144 - DNA, 80 bp, synthetic construct; identical to SEQ ID NO: 44506
  source 1..80: mol_type = other DNA

SEQ ID NO: 78145 - DNA, 80 bp, synthetic construct; identical to SEQ ID NO: 44507
  source 1..80: mol_type = other DNA

SEQ ID NO: 78146 - DNA, 80 bp, synthetic construct; identical to SEQ ID NO: 14993
  source 1..80: mol_type = other DNA

SEQ ID NO: 78147 - DNA, 80 bp, synthetic construct; identical to SEQ ID NO: 44509
  source 1..80: mol_type = other DNA

SEQ ID NO: 78148 - DNA, 80 bp, synthetic construct; identical to SEQ ID NO: 44510
  source 1..80: mol_type = other DNA

SEQ ID NO: 78149 - DNA, 80 bp, synthetic construct; identical to SEQ ID NO: 44511
  source 1..80: mol_type = other DNA

SEQ ID NO: 78150 - DNA, 80 bp, synthetic construct; identical to SEQ ID NO: 14994
  source 1..80: mol_type = other DNA

SEQ ID NO: 78151 - DNA, 80 bp, synthetic construct; identical to SEQ ID NO: 44513
  source 1..80: mol_type = other DNA

SEQ ID NO: 78152 - DNA, 80 bp, synthetic construct; identical to SEQ ID NO: 44514
  source 1..80: mol_type = other DNA

SEQ ID NO: 78153 - DNA, 80 bp, synthetic construct; identical to SEQ ID NO: 14995
  source 1..80: mol_type = other DNA

SEQ ID NO: 78154 - DNA, 80 bp, synthetic construct; identical to SEQ ID NO: 44516
  source 1..80: mol_type = other DNA

SEQ ID NO: 78155 - DNA, 80 bp, synthetic construct; identical to SEQ ID NO: 44517
  source 1..80: mol_type = other DNA

SEQ ID NO: 78156 - DNA, 80 bp, synthetic construct; identical to SEQ ID NO: 44518
  source 1..80: mol_type = other DNA

SEQ ID NO: 78157 - DNA, 80 bp, synthetic construct; identical to SEQ ID NO: 14996
  source 1..80: mol_type = other DNA

SEQ ID NO: 78158 - DNA, 80 bp, synthetic construct; identical to SEQ ID NO: 44520
  source 1..80: mol_type = other DNA

SEQ ID NO: 78159 - DNA, 80 bp, synthetic construct; identical to SEQ ID NO: 44521
  source 1..80: mol_type = other DNA

SEQ ID NO: 78160 - DNA, 80 bp, synthetic construct; identical to SEQ ID NO: 44522
  source 1..80: mol_type = other DNA

SEQ ID NO: 78161 - DNA, 80 bp, synthetic construct; identical to SEQ ID NO: 14997
  source 1..80: mol_type = other DNA

SEQ ID NO: 78162 - DNA, 80 bp, synthetic construct; identical to SEQ ID NO: 44525
  source 1..80: mol_type = other DNA

SEQ ID NO: 78163 - DNA, 80 bp, synthetic construct; identical to SEQ ID NO: 44526
  source 1..80: mol_type = other DNA

SEQ ID NO: 78164 - DNA, 80 bp, synthetic construct; identical to SEQ ID NO: 14998
  source 1..80: mol_type = other DNA

SEQ ID NO: 78165 - DNA, 80 bp, synthetic construct; identical to SEQ ID NO: 44528
  source 1..80: mol_type = other DNA

SEQ ID NO: 78166 - DNA, 80 bp, synthetic construct; identical to SEQ ID NO: 44529
  source 1..80: mol_type = other DNA

SEQ ID NO: 78167 - DNA, 80 bp, synthetic construct; identical to SEQ ID NO: 44530
  source 1..80: mol_type = other DNA

SEQ ID NO: 78168 - DNA, 80 bp, synthetic construct; identical to SEQ ID NO: 14999
  source 1..80: mol_type = other DNA

SEQ ID NO: 78169 - DNA, 80 bp, synthetic construct; identical to SEQ ID NO: 44533
  source 1..80: mol_type = other DNA

SEQ ID NO: 78170 - DNA, 80 bp, synthetic construct; identical to SEQ ID NO: 44534
  source 1..80: mol_type = other DNA

SEQ ID NO: 78171 - DNA, 80 bp, synthetic construct; identical to SEQ ID NO: 44535
  source 1..80: mol_type = other DNA

SEQ ID NO: 78172 - DNA, 80 bp, synthetic construct; identical to SEQ ID NO: 15000
  source 1..80: mol_type = other DNA

SEQ ID NO: 78173 - DNA, 80 bp, synthetic construct; identical to SEQ ID NO: 44537
  source 1..80: mol_type = other DNA

SEQ ID NO: 78174 - DNA, 80 bp, synthetic construct; identical to SEQ ID NO: 44538
  source 1..80: mol_type = other DNA

SEQ ID NO: 78175 - DNA, 80 bp, synthetic construct; identical to SEQ ID NO: 44539
  source 1..80: mol_type = other DNA

SEQ ID NO: 78176 - DNA, 80 bp, synthetic construct; identical to SEQ ID NO: 15001
  source 1..80: mol_type = other DNA

SEQ ID NO: 78177 - DNA, 80 bp, synthetic construct; identical to SEQ ID NO: 44541
  source 1..80: mol_type = other DNA

SEQ ID NO: 78178 - DNA, 80 bp, synthetic construct; identical to SEQ ID NO: 15002
  source 1..80: mol_type = other DNA

SEQ ID NO: 78179 - DNA, 80 bp, synthetic construct; identical to SEQ ID NO: 44543
  source 1..80: mol_type = other DNA

SEQ ID NO: 78180 - DNA, 80 bp, synthetic construct; identical to SEQ ID NO: 44544
  source 1..80: mol_type = other DNA

SEQ ID NO: 78181 - DNA, 80 bp, synthetic construct; identical to SEQ ID NO: 44545
  source 1..80: mol_type = other DNA

SEQ ID NO: 78182 - DNA, 80 bp, synthetic construct; identical to SEQ ID NO: 15003
  source 1..80: mol_type = other DNA

SEQ ID NO: 78183 - DNA, 80 bp, synthetic construct; identical to SEQ ID NO: 44547
  source 1..80: mol_type = other DNA

SEQ ID NO: 78184 - DNA, 80 bp, synthetic construct; identical to SEQ ID NO: 44548
  source 1..80: mol_type = other DNA

SEQ ID NO: 78185 - DNA, 80 bp, synthetic construct; identical to SEQ ID NO: 44549
  source 1..80: mol_type = other DNA

SEQ ID NO: 78186 - DNA, 80 bp, synthetic construct; identical to SEQ ID NO: 44550
  source 1..80: mol_type = other DNA

SEQ ID NO: 78187 - DNA, 80 bp, synthetic construct; identical to SEQ ID NO: 15004
  source 1..80: mol_type = other DNA

SEQ ID NO: 78188 - DNA, 80 bp, synthetic construct; identical to SEQ ID NO: 44552
  source 1..80: mol_type = other DNA

SEQ ID NO: 78189 - DNA, 80 bp, synthetic construct; identical to SEQ ID NO: 44553
  source 1..80: mol_type = other DNA

SEQ ID NO: 78190 - DNA, 80 bp, synthetic construct; identical to SEQ ID NO: 44554
  source 1..80: mol_type = other DNA

SEQ ID NO: 78191 - DNA, 80 bp, synthetic construct; identical to SEQ ID NO: 15005
  source 1..80: mol_type = other DNA

SEQ ID NO: 78192 - DNA, 80 bp, synthetic construct; identical to SEQ ID NO: 44556
  source 1..80: mol_type = other DNA

SEQ ID NO: 78193 - DNA, 80 bp, synthetic construct; identical to SEQ ID NO: 44557
  source 1..80: mol_type = other DNA

SEQ ID NO: 78194 - DNA, 80 bp, synthetic construct; identical to SEQ ID NO: 15006
  source 1..80: mol_type = other DNA

SEQ ID NO: 78195 - DNA, 80 bp, synthetic construct; identical to SEQ ID NO: 44559
  source 1..80: mol_type = other DNA

SEQ ID NO: 78196 - DNA, 80 bp, synthetic construct; identical to SEQ ID NO: 44560
  source 1..80: mol_type = other DNA

SEQ ID NO: 78197 - DNA, 80 bp, synthetic construct; identical to SEQ ID NO: 44561
  source 1..80: mol_type = other DNA

SEQ ID NO: 78198 - DNA, 80 bp, synthetic construct; identical to SEQ ID NO: 15007
  source 1..80: mol_type = other DNA

SEQ ID NO: 78199 - DNA, 80 bp, synthetic construct; identical to SEQ ID NO: 44563
  source 1..80: mol_type = other DNA

SEQ ID NO: 78200 - DNA, 80 bp, synthetic construct; identical to SEQ ID NO: 44564
  source 1..80: mol_type = other DNA

SEQ ID NO: 78201 - DNA, 80 bp, synthetic construct; identical to SEQ ID NO: 44565
  source 1..80: mol_type = other DNA

SEQ ID NO: 78202 - DNA, 80 bp, synthetic construct; identical to SEQ ID NO: 15008
  source 1..80: mol_type = other DNA

SEQ ID NO: 78203 - DNA, 80 bp, synthetic construct; identical to SEQ ID NO: 44567
  source 1..80: mol_type = other DNA

SEQ ID NO: 78204 - DNA, 80 bp, synthetic construct; identical to SEQ ID NO: 44568
  source 1..80: mol_type = other DNA

SEQ ID NO: 78205 - DNA, 80 bp, synthetic construct; identical to SEQ ID NO: 44569
  source 1..80: mol_type = other DNA

SEQ ID NO: 78206 - DNA, 80 bp, synthetic construct; identical to SEQ ID NO: 15009
  source 1..80: mol_type = other DNA

SEQ ID NO: 78207 - DNA, 80 bp, synthetic construct; identical to SEQ ID NO: 44571
  source 1..80: mol_type = other DNA

SEQ ID NO: 78208 - DNA, 80 bp, synthetic construct; identical to SEQ ID NO: 44572
  source 1..80: mol_type = other DNA

SEQ ID NO: 78209 - DNA, 80 bp, synthetic construct; identical to SEQ ID NO: 44573
  source 1..80: mol_type = other DNA

SEQ ID NO: 78210 - DNA, 80 bp, synthetic construct; identical to SEQ ID NO: 15010
  source 1..80: mol_type = other DNA

SEQ ID NO: 78211 - DNA, 80 bp, synthetic construct; identical to SEQ ID NO: 44575
  source 1..80: mol_type = other DNA

SEQ ID NO: 78212 - DNA, 80 bp, synthetic construct; identical to SEQ ID NO: 44576
  source 1..80: mol_type = other DNA

SEQ ID NO: 78213 - DNA, 80 bp, synthetic construct; identical to SEQ ID NO: 44577
  source 1..80: mol_type = other DNA

SEQ ID NO: 78214 - DNA, 80 bp, synthetic construct; identical to SEQ ID NO: 15011
  source 1..80: mol_type = other DNA

SEQ ID NO: 78215 - DNA, 80 bp, synthetic construct; identical to SEQ ID NO: 44579
  source 1..80: mol_type = other DNA

SEQ ID NO: 78216 - DNA, 80 bp, synthetic construct; identical to SEQ ID NO: 44580
  source 1..80: mol_type = other DNA

SEQ ID NO: 78217 - DNA, 80 bp, synthetic construct; identical to SEQ ID NO: 44581
  source 1..80: mol_type = other DNA

SEQ ID NO: 78218 - DNA, 80 bp, synthetic construct; identical to SEQ ID NO: 15012
  source 1..80: mol_type = other DNA

SEQ ID NO: 78219 - DNA, 80 bp, synthetic construct; identical to SEQ ID NO: 44583
  source 1..80: mol_type = other DNA

SEQ ID NO: 78220 - DNA, 80 bp, synthetic construct; identical to SEQ ID NO: 44584
  source 1..80: mol_type = other DNA

SEQ ID NO: 78221 - DNA, 80 bp, synthetic construct; identical to SEQ ID NO: 44585
  source 1..80: mol_type = other DNA

SEQ ID NO: 78222 - DNA, 80 bp, synthetic construct; identical to SEQ ID NO: 15013
  source 1..80: mol_type = other DNA

SEQ ID NO: 78223 - DNA, 80 bp, synthetic construct; identical to SEQ ID NO: 44587
  source 1..80: mol_type = other DNA

SEQ ID NO: 78224 - DNA, 80 bp, synthetic construct; identical to SEQ ID NO: 44588
  source 1..80: mol_type = other DNA

SEQ ID NO: 78225 - DNA, 80 bp, synthetic construct; identical to SEQ ID NO: 44589
  source 1..80: mol_type = other DNA

SEQ ID NO: 78226 - DNA, 80 bp, synthetic construct; identical to SEQ ID NO: 15014
  source 1..80: mol_type = other DNA

SEQ ID NO: 78227 - DNA, 80 bp, synthetic construct; identical to SEQ ID NO: 44591
  source 1..80: mol_type = other DNA

SEQ ID NO: 78228 - DNA, 80 bp, synthetic construct; identical to SEQ ID NO: 44592
  source 1..80: mol_type = other DNA

SEQ ID NO: 78229 - DNA, 80 bp, synthetic construct; identical to SEQ ID NO: 44593
  source 1..80: mol_type = other DNA

SEQ ID NO: 78230 - DNA, 80 bp, synthetic construct; identical to SEQ ID NO: 44594
  source 1..80: mol_type = other DNA

SEQ ID NO: 78231 - DNA, 80 bp, synthetic construct; identical to SEQ ID NO: 15015
  source 1..80: mol_type = other DNA

SEQ ID NO: 78232 - DNA, 80 bp, synthetic construct; identical to SEQ ID NO: 44596
  source 1..80: mol_type = other DNA

SEQ ID NO: 78233 - DNA, 80 bp, synthetic construct; identical to SEQ ID NO: 44597
  source 1..80: mol_type = other DNA

SEQ ID NO: 78234 - DNA, 80 bp, synthetic construct; identical to SEQ ID NO: 44598
  source 1..80: mol_type = other DNA

SEQ ID NO: 78235 - DNA, 80 bp, synthetic construct; identical to SEQ ID NO: 15016
  source 1..80: mol_type = other DNA

SEQ ID NO: 78236 - DNA, 80 bp, synthetic construct; identical to SEQ ID NO: 44600
  source 1..80: mol_type = other DNA

SEQ ID NO: 78237 - DNA, 80 bp, synthetic construct; identical to SEQ ID NO: 44601
  source 1..80: mol_type = other DNA

SEQ ID NO: 78238 - DNA, 80 bp, synthetic construct; identical to SEQ ID NO: 44602
  source 1..80: mol_type = other DNA

SEQ ID NO: 78239 - DNA, 80 bp, synthetic construct; identical to SEQ ID NO: 15017
  source 1..80: mol_type = other DNA

SEQ ID NO: 78240 - DNA, 80 bp, synthetic construct; identical to SEQ ID NO: 44604
  source 1..80: mol_type = other DNA

SEQ ID NO: 78241 - DNA, 80 bp, synthetic construct; identical to SEQ ID NO: 44605
  source 1..80: mol_type = other DNA

SEQ ID NO: 78242 - DNA, 80 bp, synthetic construct; identical to SEQ ID NO: 15018
  source 1..80: mol_type = other DNA

SEQ ID NO: 78243 - DNA, 80 bp, synthetic construct; identical to SEQ ID NO: 44607
  source 1..80: mol_type = other DNA

SEQ ID NO: 78244 - DNA, 80 bp, synthetic construct; identical to SEQ ID NO: 44608
  source 1..80: mol_type = other DNA

SEQ ID NO: 78245 - DNA, 80 bp, synthetic construct; identical to SEQ ID NO: 44609
  source 1..80: mol_type = other DNA

SEQ ID NO: 78246 - DNA, 80 bp, synthetic construct; identical to SEQ ID NO: 44610
  source 1..80: mol_type = other DNA

SEQ ID NO: 78247 - DNA, 80 bp, synthetic construct; identical to SEQ ID NO: 15019
  source 1..80: mol_type = other DNA

SEQ ID NO: 78248 - DNA, 80 bp, synthetic construct; identical to SEQ ID NO: 44612
  source 1..80: mol_type = other DNA

SEQ ID NO: 78249 - DNA, 80 bp, synthetic construct; identical to SEQ ID NO: 44613
  source 1..80: mol_type = other DNA

SEQ ID NO: 78250 - DNA, 80 bp, synthetic construct; identical to SEQ ID NO: 44614
  source 1..80: mol_type = other DNA

SEQ ID NO: 78251 - DNA, 80 bp, synthetic construct; identical to SEQ ID NO: 15020
  source 1..80: mol_type = other DNA

SEQ ID NO: 78252 - DNA, 80 bp, synthetic construct; identical to SEQ ID NO: 44616
  source 1..80: mol_type = other DNA

SEQ ID NO: 78253 - DNA, 80 bp, synthetic construct; identical to SEQ ID NO: 44617
  source 1..80: mol_type = other DNA

SEQ ID NO: 78254 - DNA, 80 bp, synthetic construct; identical to SEQ ID NO: 44618
  source 1..80: mol_type = other DNA

SEQ ID NO: 78255 - DNA, 80 bp, synthetic construct; identical to SEQ ID NO: 15021
  source 1..80: mol_type = other DNA

SEQ ID NO: 78256 - DNA, 80 bp, synthetic construct; identical to SEQ ID NO: 44620
  source 1..80: mol_type = other DNA

SEQ ID NO: 78257 - DNA, 80 bp, synthetic construct; identical to SEQ ID NO: 44621
  source 1..80: mol_type = other DNA

SEQ ID NO: 78258 - DNA, 80 bp, synthetic construct; identical to SEQ ID NO: 15022
  source 1..80: mol_type = other DNA

SEQ ID NO: 78259 - DNA, 80 bp, synthetic construct; identical to SEQ ID NO: 44623
  source 1..80: mol_type = other DNA

SEQ ID NO: 78260 - DNA, 80 bp, synthetic construct; identical to SEQ ID NO: 44624
  source 1..80: mol_type = other DNA

SEQ ID NO: 78261 - DNA, 80 bp, synthetic construct; identical to SEQ ID NO: 44625
  source 1..80: mol_type = other DNA

SEQ ID NO: 78262 - DNA, 80 bp, synthetic construct; identical to SEQ ID NO: 15023
  source 1..80: mol_type = other DNA

SEQ ID NO: 78263 - DNA, 80 bp, synthetic construct; identical to SEQ ID NO: 44627
  source 1..80: mol_type = other DNA

SEQ ID NO: 78264 - DNA, 80 bp, synthetic construct; identical to SEQ ID NO: 44628
  source 1..80: mol_type = other DNA

SEQ ID NO: 78265 - DNA, 80 bp, synthetic construct; identical to SEQ ID NO: 44629
  source 1..80: mol_type = other DNA

SEQ ID NO: 78266 - DNA, 80 bp, synthetic construct; identical to SEQ ID NO: 44630
  source 1..80: mol_type = other DNA

SEQ ID NO: 78267 - DNA, 80 bp, synthetic construct; identical to SEQ ID NO: 15024
  source 1..80: mol_type = other DNA

SEQ ID NO: 78268 - DNA, 80 bp, synthetic construct; identical to SEQ ID NO: 44632
  source 1..80: mol_type = other DNA

SEQ ID NO: 78269 - DNA, 80 bp, synthetic construct; identical to SEQ ID NO: 44633
  source 1..80: mol_type = other DNA

SEQ ID NO: 78270 - DNA, 80 bp, synthetic construct; identical to SEQ ID NO: 44634
  source 1..80: mol_type = other DNA

SEQ ID NO: 78271 - DNA, 80 bp, synthetic construct; identical to SEQ ID NO: 15025
  source 1..80: mol_type = other DNA

SEQ ID NO: 78272 - DNA, 80 bp, synthetic construct; identical to SEQ ID NO: 44636
  source 1..80: mol_type = other DNA

SEQ ID NO: 78273 - DNA, 80 bp, synthetic construct; identical to SEQ ID NO: 44637
  source 1..80: mol_type = other DNA

SEQ ID NO: 78274 - DNA, 80 bp, synthetic construct; identical to SEQ ID NO: 44638
  source 1..80: mol_type = other DNA

SEQ ID NO: 78275 - DNA, 80 bp, synthetic construct; identical to SEQ ID NO: 44639
  source 1..80: mol_type = other DNA

SEQ ID NO: 78276 - DNA, 80 bp, synthetic construct; identical to SEQ ID NO: 15026
  source 1..80: mol_type = other DNA

SEQ ID NO: 78277 - DNA, 80 bp, synthetic construct; identical to SEQ ID NO: 44641
  source 1..80: mol_type = other DNA

SEQ ID NO: 78278 - DNA, 80 bp, synthetic construct; identical to SEQ ID NO: 44642
  source 1..80: mol_type = other DNA

SEQ ID NO: 78279 - DNA, 80 bp, synthetic construct; identical to SEQ ID NO: 44643
  source 1..80: mol_type = other DNA

SEQ ID NO: 78280 - DNA, 80 bp, synthetic construct; identical to SEQ ID NO: 15027
  source 1..80: mol_type = other DNA

SEQ ID NO: 78281 - DNA, 80 bp, synthetic construct; identical to SEQ ID NO: 44645
  source 1..80: mol_type = other DNA

SEQ ID NO: 78282 - DNA, 80 bp, synthetic construct; identical to SEQ ID NO: 44646
  source 1..80: mol_type = other DNA

SEQ ID NO: 78283 - DNA, 80 bp, synthetic construct; identical to SEQ ID NO: 15028
  source 1..80: mol_type = other DNA

SEQ ID NO: 78284 - DNA, 80 bp, synthetic construct; identical to SEQ ID NO: 44648
  source 1..80: mol_type = other DNA

SEQ ID NO: 78285 - DNA, 80 bp, synthetic construct; identical to SEQ ID NO: 44649
  source 1..80: mol_type = other DNA

SEQ ID NO: 78286 - DNA, 80 bp, synthetic construct; identical to SEQ ID NO: 44650
  source 1..80: mol_type = other DNA

SEQ ID NO: 78287 - DNA, 80 bp, synthetic construct; identical to SEQ ID NO: 15029
  source 1..80: mol_type = other DNA

SEQ ID NO: 78288 - DNA, 80 bp, synthetic construct; identical to SEQ ID NO: 44652
  source 1..80: mol_type = other DNA

SEQ ID NO: 78289 - DNA, 80 bp, synthetic construct; identical to SEQ ID NO: 44653
  source 1..80: mol_type = other DNA

SEQ ID NO: 78290 - DNA, 80 bp, synthetic construct; identical to SEQ ID NO: 15030
  source 1..80: mol_type = other DNA

SEQ ID NO: 78291 - DNA, 80 bp, synthetic construct; identical to SEQ ID NO: 44656
  source 1..80: mol_type = other DNA

SEQ ID NO: 78292 - DNA, 80 bp, synthetic construct; identical to SEQ ID NO: 44657
  source 1..80: mol_type = other DNA

SEQ ID NO: 78293 - DNA, 80 bp, synthetic construct; identical to SEQ ID NO: 44658
  source 1..80: mol_type = other DNA

SEQ ID NO: 78294 - DNA, 80 bp, synthetic construct; identical to SEQ ID NO: 44659
  source 1..80: mol_type = other DNA

SEQ ID NO: 78295 - DNA, 80 bp, synthetic construct; identical to SEQ ID NO: 15031
  source 1..80: mol_type = other DNA

SEQ ID NO: 78296 - DNA, 80 bp, synthetic construct; identical to SEQ ID NO: 44661
  source 1..80: mol_type = other DNA

SEQ ID NO: 78297 - DNA, 80 bp, synthetic construct; identical to SEQ ID NO: 44662
  source 1..80: mol_type = other DNA

SEQ ID NO: 78298 - DNA, 80 bp, synthetic construct; identical to SEQ ID NO: 15032
  source 1..80: mol_type = other DNA

SEQ ID NO: 78299 - DNA, 80 bp, synthetic construct; identical to SEQ ID NO: 44664
  source 1..80: mol_type = other DNA

SEQ ID NO: 78300 - DNA, 80 bp, synthetic construct; identical to SEQ ID NO: 44665
  source 1..80: mol_type = other DNA

SEQ ID NO: 78301 - DNA, 80 bp, synthetic construct; identical to SEQ ID NO: 44666
  source 1..80: mol_type = other DNA

SEQ ID NO: 78302 - DNA, 80 bp, synthetic construct; identical to SEQ ID NO: 44667
  source 1..80: mol_type = other DNA

SEQ ID NO: 78303 - DNA, 80 bp, synthetic construct; identical to SEQ ID NO: 15033
  source 1..80: mol_type = other DNA

SEQ ID NO: 78304 - DNA, 80 bp, synthetic construct; identical to SEQ ID NO: 44669
  source 1..80: mol_type = other DNA

SEQ ID NO: 78305 - DNA, 80 bp, synthetic construct; identical to SEQ ID NO: 44670
  source 1..80: mol_type = other DNA

SEQ ID NO: 78306 - DNA, 80 bp, synthetic construct; identical to SEQ ID NO: 44671
  source 1..80: mol_type = other DNA

SEQ ID NO: 78307 - DNA, 80 bp, synthetic construct; identical to SEQ ID NO: 15034
  source 1..80: mol_type = other DNA

SEQ ID NO: 78308 - DNA, 80 bp, synthetic construct; identical to SEQ ID NO: 44673
  source 1..80: mol_type = other DNA

SEQ ID NO: 78309 - DNA, 80 bp, synthetic construct; identical to SEQ ID NO: 44674
  source 1..80: mol_type = other DNA

SEQ ID NO: 78310 - DNA, 80 bp, synthetic construct; identical to SEQ ID NO: 15035
  source 1..80: mol_type = other DNA

SEQ ID NO: 78311 - DNA, 80 bp, synthetic construct; identical to SEQ ID NO: 44676
  source 1..80: mol_type = other DNA

SEQ ID NO: 78312 - DNA, 80 bp, synthetic construct; identical to SEQ ID NO: 44677
  source 1..80: mol_type = other DNA

SEQ ID NO: 78313 - DNA, 80 bp, synthetic construct; identical to SEQ ID NO: 44678
  source 1..80: mol_type = other DNA

SEQ ID NO: 78314 - DNA, 80 bp, synthetic construct; identical to SEQ ID NO: 15036
  source 1..80: mol_type = other DNA

SEQ ID NO: 78315 - DNA, 80 bp, synthetic construct; identical to SEQ ID NO: 44680
  source 1..80: mol_type = other DNA

SEQ ID NO: 78316 - DNA, 80 bp, synthetic construct; identical to SEQ ID NO: 44681
  source 1..80: mol_type = other DNA

SEQ ID NO: 78317 - DNA, 80 bp, synthetic construct; identical to SEQ ID NO: 44682
  source 1..80: mol_type = other DNA

SEQ ID NO: 78318 - DNA, 80 bp, synthetic construct; identical to SEQ ID NO: 15037
  source 1..80: mol_type = other DNA

SEQ ID NO: 78319 - DNA, 80 bp, synthetic construct; identical to SEQ ID NO: 44684
  source 1..80: mol_type = other DNA

SEQ ID NO: 78320 - DNA, 80 bp, synthetic construct; identical to SEQ ID NO: 44685
  source 1..80: mol_type = other DNA

SEQ ID NO: 78321 - DNA, 80 bp, synthetic construct; identical to SEQ ID NO: 15038
  source 1..80: mol_type = other DNA

SEQ ID NO: 78322 - DNA, 80 bp, synthetic construct; identical to SEQ ID NO: 44688
  source 1..80: mol_type = other DNA

SEQ ID NO: 78323 - DNA, 80 bp, synthetic construct; identical to SEQ ID NO: 44689
  source 1..80: mol_type = other DNA

SEQ ID NO: 78324 - DNA, 80 bp, synthetic construct; identical to SEQ ID NO: 44690
  source 1..80: mol_type = other DNA

SEQ ID NO: 78325 - DNA, 80 bp, synthetic construct; identical to SEQ ID NO: 44691
  source 1..80: mol_type = other DNA

SEQ ID NO: 78326 - DNA, 80 bp, synthetic construct; identical to SEQ ID NO: 15039
  source 1..80: mol_type = other DNA

SEQ ID NO: 78327 - DNA, 80 bp, synthetic construct; identical to SEQ ID NO: 44693
  source 1..80: mol_type = other DNA

SEQ ID NO: 78328 - DNA, 80 bp, synthetic construct; identical to SEQ ID NO: 44694
  source 1..80: mol_type = other DNA

SEQ ID NO: 78329 - DNA, 80 bp, synthetic construct; identical to SEQ ID NO: 15040
  source 1..80: mol_type = other DNA

SEQ ID NO: 78330 - DNA, 80 bp, synthetic construct; identical to SEQ ID NO: 44696
  source 1..80: mol_type = other DNA

SEQ ID NO: 78331 - DNA, 80 bp, synthetic construct; identical to SEQ ID NO: 44697
  source 1..80: mol_type = other DNA

SEQ ID NO: 78332 - DNA, 80 bp, synthetic construct; identical to SEQ ID NO: 44698
  source 1..80: mol_type = other DNA

SEQ ID NO: 78333 - DNA, 80 bp, synthetic construct; identical to SEQ ID NO: 44699
  source 1..80: mol_type = other DNA

SEQ ID NO: 78334 - DNA, 80 bp, synthetic construct; identical to SEQ ID NO: 15041
  source 1..80: mol_type = other DNA

SEQ ID NO: 78335 - DNA, 80 bp, synthetic construct; identical to SEQ ID NO: 44701
  source 1..80: mol_type = other DNA

SEQ ID NO: 78336 - DNA, 80 bp, synthetic construct; identical to SEQ ID NO: 44702
  source 1..80: mol_type = other DNA

SEQ ID NO: 78337 - DNA, 80 bp, synthetic construct; identical to SEQ ID NO: 44703
  source 1..80: mol_type = other DNA

SEQ ID NO: 78338 - DNA, 80 bp, synthetic construct; identical to SEQ ID NO: 15042
  source 1..80: mol_type = other DNA

SEQ ID NO: 78339 - DNA, 80 bp, synthetic construct; identical to SEQ ID NO: 44705
  source 1..80: mol_type = other DNA

SEQ ID NO: 78340 - DNA, 80 bp, synthetic construct; identical to SEQ ID NO: 44706
  source 1..80: mol_type = other DNA

SEQ ID NO: 78341 - DNA, 80 bp, synthetic construct; identical to SEQ ID NO: 15043
  source 1..80: mol_type = other DNA

SEQ ID NO: 78342 - DNA, 80 bp, synthetic construct; identical to SEQ ID NO: 44708
  source 1..80: mol_type = other DNA

SEQ ID NO: 78343 - DNA, 80 bp, synthetic construct; identical to SEQ ID NO: 44709
  source 1..80: mol_type = other DNA

SEQ ID NO: 78344 - DNA, 80 bp, synthetic construct; identical to SEQ ID NO: 44710
  source 1..80: mol_type = other DNA

SEQ ID NO: 78345 - DNA, 80 bp, synthetic construct; identical to SEQ ID NO: 44711
  source 1..80: mol_type = other DNA

SEQ ID NO: 78346 - DNA, 80 bp, synthetic construct; identical to SEQ ID NO: 15044
  source 1..80: mol_type = other DNA

SEQ ID NO: 78347 - DNA, 80 bp, synthetic construct; identical to SEQ ID NO: 44713
  source 1..80: mol_type = other DNA

SEQ ID NO: 78348 - DNA, 80 bp, synthetic construct; identical to SEQ ID NO: 44714
  source 1..80: mol_type = other DNA

SEQ ID NO: 78349 - DNA, 80 bp, synthetic construct; identical to SEQ ID NO: 44715
  source 1..80: mol_type = other DNA

SEQ ID NO: 78350 - DNA, 80 bp, synthetic construct; identical to SEQ ID NO: 15045
  source 1..80: mol_type = other DNA

SEQ ID NO: 78351 - DNA, 80 bp, synthetic construct; identical to SEQ ID NO: 44718
  source 1..80: mol_type = other DNA

SEQ ID NO: 78352 - DNA, 80 bp, synthetic construct; identical to SEQ ID NO: 15046
  source 1..80: mol_type = other DNA

SEQ ID NO: 78353 - DNA, 80 bp, synthetic construct; identical to SEQ ID NO: 44720
  source 1..80: mol_type = other DNA

SEQ ID NO: 78354 - DNA, 80 bp, synthetic construct; identical to SEQ ID NO: 44721
  source 1..80: mol_type = other DNA

SEQ ID NO: 78355 - DNA, 80 bp, synthetic construct; identical to SEQ ID NO: 44722
  source 1..80: mol_type = other DNA

SEQ ID NO: 78356 - DNA, 80 bp, synthetic construct; identical to SEQ ID NO: 15047
  source 1..80: mol_type = other DNA

SEQ ID NO: 78357 - DNA, 80 bp, synthetic construct; identical to SEQ ID NO: 44724
  source 1..80: mol_type = other DNA

SEQ ID NO: 78358 - DNA, 80 bp, synthetic construct; identical to SEQ ID NO: 44725
  source 1..80: mol_type = other DNA

SEQ ID NO: 78359 - DNA, 80 bp, synthetic construct; identical to SEQ ID NO: 44726
  source 1..80: mol_type = other DNA

SEQ ID NO: 78360 - DNA, 80 bp, synthetic construct; identical to SEQ ID NO: 15048
  source 1..80: mol_type = other DNA

SEQ ID NO: 78361 - DNA, 80 bp, synthetic construct; identical to SEQ ID NO: 44728
  source 1..80: mol_type = other DNA

SEQ ID NO: 78362 - DNA, 80 bp, synthetic construct; identical to SEQ ID NO: 44729
  source 1..80: mol_type = other DNA

SEQ ID NO: 78363 - DNA, 80 bp, synthetic construct; identical to SEQ ID NO: 44730
  source 1..80: mol_type = other DNA

SEQ ID NO: 78364 - DNA, 80 bp, synthetic construct; identical to SEQ ID NO: 15049
  source 1..80: mol_type = other DNA

SEQ ID NO: 78365 - DNA, 80 bp, synthetic construct; identical to SEQ ID NO: 44732
  source 1..80: mol_type = other DNA

SEQ ID NO: 78366 - DNA, 80 bp, synthetic construct; identical to SEQ ID NO: 44733
  source 1..80: mol_type = other DNA

SEQ ID NO: 78367 - DNA, 80 bp, synthetic construct; identical to SEQ ID NO: 44734
  source 1..80: mol_type = other DNA

SEQ ID NO: 78368 - DNA, 80 bp, synthetic construct; identical to SEQ ID NO: 44735
  source 1..80: mol_type = other DNA

SEQ ID NO: 78369 - DNA, 80 bp, synthetic construct; identical to SEQ ID NO: 15050
  source 1..80: mol_type = other DNA

SEQ ID NO: 78370 - DNA, 80 bp, synthetic construct; identical to SEQ ID NO: 44737
  source 1..80: mol_type = other DNA

SEQ ID NO: 78371 - DNA, 80 bp, synthetic construct; identical to SEQ ID NO: 44738
  source 1..80: mol_type = other DNA

SEQ ID NO: 78372 - DNA, 80 bp, synthetic construct; identical to SEQ ID NO: 15051
  source 1..80: mol_type = other DNA

SEQ ID NO: 78373 - DNA, 80 bp, synthetic construct; identical to SEQ ID NO: 44740
  source 1..80: mol_type = other DNA

SEQ ID NO: 78374 - DNA, 80 bp, synthetic construct; identical to SEQ ID NO: 44741
  source 1..80: mol_type = other DNA

SEQ ID NO: 78375 - DNA, 80 bp, synthetic construct; identical to SEQ ID NO: 44742
  source 1..80: mol_type = other DNA

SEQ ID NO: 78376 - DNA, 80 bp, synthetic construct; identical to SEQ ID NO: 44743
  source 1..80: mol_type = other DNA

SEQ ID NO: 78377 - DNA, 80 bp, synthetic construct; identical to SEQ ID NO: 15052
  source 1..80: mol_type = other DNA

SEQ ID NO: 78378 - DNA, 80 bp, synthetic construct; identical to SEQ ID NO: 44745
  source 1..80: mol_type = other DNA

SEQ ID NO: 78379 - DNA, 80 bp, synthetic construct; identical to SEQ ID NO: 44746
  source 1..80: mol_type = other DNA

SEQ ID NO: 78380 - DNA, 80 bp, synthetic construct; identical to SEQ ID NO: 44747
  source 1..80: mol_type = other DNA

SEQ ID NO: 78381 - DNA, 80 bp, synthetic construct; identical to SEQ ID NO: 15053
  source 1..80: mol_type = other DNA

SEQ ID NO: 78382 - DNA, 80 bp, synthetic construct; identical to SEQ ID NO: 44749
  source 1..80: mol_type = other DNA

SEQ ID NO: 78383 - DNA, 80 bp, synthetic construct; identical to SEQ ID NO: 44750
  source 1..80: mol_type = other DNA

SEQ ID NO: 78384 - DNA, 80 bp, synthetic construct; identical to SEQ ID NO: 15054
  source 1..80: mol_type = other DNA

SEQ ID NO: 78385 - DNA, 80 bp, synthetic construct; identical to SEQ ID NO: 44752
  source 1..80: mol_type = other DNA

SEQ ID NO: 78386 - DNA, 80 bp, synthetic construct; identical to SEQ ID NO: 44753
  source 1..80: mol_type = other DNA

SEQ ID NO: 78387 - DNA, 80 bp, synthetic construct; identical to SEQ ID NO: 44754
  source 1..80: mol_type = other DNA

SEQ ID NO: 78388 - DNA, 80 bp, synthetic construct; identical to SEQ ID NO: 15055
  source 1..80: mol_type = other DNA

SEQ ID NO: 78389 - DNA, 80 bp, synthetic construct; identical to SEQ ID NO: 44756
  source 1..80: mol_type = other DNA

SEQ ID NO: 78390 - DNA, 80 bp, synthetic construct; identical to SEQ ID NO: 44757
  source 1..80: mol_type = other DNA

SEQ ID NO: 78391 - DNA, 80 bp, synthetic construct; identical to SEQ ID NO: 44758
  source 1..80: mol_type = other DNA

SEQ ID NO: 78392 - DNA, 80 bp, synthetic construct; identical to SEQ ID NO: 15056
  source 1..80: mol_type = other DNA

SEQ ID NO: 78393 - DNA, 80 bp, synthetic construct; identical to SEQ ID NO: 44760
  source 1..80: mol_type = other DNA

SEQ ID NO: 78394 - DNA, 80 bp, synthetic construct; identical to SEQ ID NO: 44761
  source 1..80: mol_type = other DNA

SEQ ID NO: 78395 - DNA, 80 bp, synthetic construct; identical to SEQ ID NO: 44762
  source 1..80: mol_type = other DNA

SEQ ID NO: 78396 - DNA, 80 bp, synthetic construct; identical to SEQ ID NO: 44763
  source 1..80: mol_type = other DNA

SEQ ID NO: 78397 - DNA, 80 bp, synthetic construct; identical to SEQ ID NO: 15057
  source 1..80: mol_type = other DNA

SEQ ID NO: 78398 - DNA, 80 bp, synthetic construct; identical to SEQ ID NO: 44765
  source 1..80: mol_type = other DNA

SEQ ID NO: 78399 - DNA, 80 bp, synthetic construct; identical to SEQ ID NO: 44766
  source 1..80: mol_type = other DNA

SEQ ID NO: 78400 - DNA, 80 bp, synthetic construct; identical to SEQ ID NO: 44767
  source 1..80: mol_type = other DNA

SEQ ID NO: 78401 - DNA, 80 bp, synthetic construct; identical to SEQ ID NO: 15058
  source 1..80: mol_type = other DNA

SEQ ID NO: 78402 - DNA, 80 bp, synthetic construct; identical to SEQ ID NO: 44769
  source 1..80: mol_type = other DNA

SEQ ID NO: 78403 - DNA, 80 bp, synthetic construct; identical to SEQ ID NO: 44770
  source 1..80: mol_type = other DNA

SEQ ID NO: 78404 - DNA, 80 bp, synthetic construct; identical to SEQ ID NO: 44771
  source 1..80: mol_type = other DNA

SEQ ID NO: 78405 - DNA, 80 bp, synthetic construct; identical to SEQ ID NO: 15059
  source 1..80: mol_type = other DNA

SEQ ID NO: 78406 - DNA, 80 bp, synthetic construct; identical to SEQ ID NO: 44773
  source 1..80: mol_type = other DNA

SEQ ID NO: 78407 - DNA, 80 bp, synthetic construct; identical to SEQ ID NO: 44774
  source 1..80: mol_type = other DNA

SEQ ID NO: 78408 - DNA, 80 bp, synthetic construct; identical to SEQ ID NO: 15060
  source 1..80: mol_type = other DNA

SEQ ID NO: 78409 - DNA, 80 bp, synthetic construct; identical to SEQ ID NO: 44776
  source 1..80: mol_type = other DNA

SEQ ID NO: 78410 - DNA, 80 bp, synthetic construct; identical to SEQ ID NO: 44777
  source 1..80: mol_type = other DNA

SEQ ID NO: 78411 - DNA, 80 bp, synthetic construct; identical to SEQ ID NO: 44778
  source 1..80: mol_type = other DNA

SEQ ID NO: 78412 - DNA, 80 bp, synthetic construct; identical to SEQ ID NO: 15061
  source 1..80: mol_type = other DNA

SEQ ID NO: 78413 - DNA, 80 bp, synthetic construct; identical to SEQ ID NO: 44780
  source 1..80: mol_type = other DNA

SEQ ID NO: 78414 - DNA, 80 bp, synthetic construct; identical to SEQ ID NO: 44781
  source 1..80: mol_type = other DNA

SEQ ID NO: 78415 - DNA, 80 bp, synthetic construct; identical to SEQ ID NO: 44782
  source 1..80: mol_type = other DNA

SEQ ID NO: 78416 - DNA, 80 bp, synthetic construct; identical to SEQ ID NO: 15062
  source 1..80: mol_type = other DNA

SEQ ID NO: 78417 - DNA, 80 bp, synthetic construct; identical to SEQ ID NO: 44784
  source 1..80: mol_type = other DNA

SEQ ID NO: 78418 - DNA, 80 bp, synthetic construct; identical to SEQ ID NO: 44785
  source 1..80: mol_type = other DNA

SEQ ID NO: 78419 - DNA, 80 bp, synthetic construct; identical to SEQ ID NO: 44786
  source 1..80: mol_type = other DNA

SEQ ID NO: 78420 - DNA, 80 bp, synthetic construct; identical to SEQ ID NO: 44787
  source 1..80: mol_type = other DNA

SEQ ID NO: 78421 - DNA, 80 bp, synthetic construct; identical to SEQ ID NO: 15063
  source 1..80: mol_type = other DNA

SEQ ID NO: 78422 - DNA, 80 bp, synthetic construct; identical to SEQ ID NO: 44789
  source 1..80: mol_type = other DNA

SEQ ID NO: 78423 - DNA, 80 bp, synthetic construct; identical to SEQ ID NO: 44790
  source 1..80: mol_type = other DNA

SEQ ID NO: 78424 - DNA, 80 bp, synthetic construct; identical to SEQ ID NO: 44791
  source 1..80: mol_type = other DNA

SEQ ID NO: 78425 - DNA, 80 bp, synthetic construct; identical to SEQ ID NO: 15064
  source 1..80: mol_type = other DNA

SEQ ID NO: 78426 - DNA, 80 bp, synthetic construct; identical to SEQ ID NO: 44793
  source 1..80: mol_type = other DNA

SEQ ID NO: 78427 - DNA, 80 bp, synthetic construct; identical to SEQ ID NO: 44794
  source 1..80: mol_type = other DNA

SEQ ID NO: 78428 - DNA, 80 bp, synthetic construct; identical to SEQ ID NO: 44796
  source 1..80: mol_type = other DNA

SEQ ID NO: 78429 - DNA, 80 bp, synthetic construct; identical to SEQ ID NO: 15065
  source 1..80: mol_type = other DNA

SEQ ID NO: 78430 - DNA, 80 bp, synthetic construct; identical to SEQ ID NO: 44798
  source 1..80: mol_type = other DNA

SEQ ID NO: 78431 - DNA, 80 bp, synthetic construct; identical to SEQ ID NO: 44799
  source 1..80: mol_type = other DNA

SEQ ID NO: 78432 - DNA, 80 bp, synthetic construct; identical to SEQ ID NO: 44800
  source 1..80: mol_type = other DNA

SEQ ID NO: 78433 - DNA, 80 bp, synthetic construct; identical to SEQ ID NO: 15066
  source 1..80: mol_type = other DNA

SEQ ID NO: 78434 - DNA, 80 bp, synthetic construct; identical to SEQ ID NO: 44802
  source 1..80: mol_type = other DNA

SEQ ID NO: 78435 - DNA, 80 bp, synthetic construct; identical to SEQ ID NO: 44803
  source 1..80: mol_type = other DNA

SEQ ID NO: 78436 - DNA, 80 bp, synthetic construct; identical to SEQ ID NO: 44804
  source 1..80: mol_type = other DNA

SEQ ID NO: 78437 - DNA, 80 bp, synthetic construct; identical to SEQ ID NO: 15067
  source 1..80: mol_type = other DNA

SEQ ID NO: 78438 - DNA, 80 bp, synthetic construct; identical to SEQ ID NO: 44806
  source 1..80: mol_type = other DNA

SEQ ID NO: 78439 - DNA, 80 bp, synthetic construct; identical to SEQ ID NO: 44807
  source 1..80: mol_type = other DNA

SEQ ID NO: 78440 - DNA, 80 bp, synthetic construct; identical to SEQ ID NO: 15068
  source 1..80: mol_type = other DNA

SEQ ID NO: 78441 - DNA, 80 bp, synthetic construct; identical to SEQ ID NO: 44809
  source 1..80: mol_type = other DNA

SEQ ID NO: 78442 - DNA, 80 bp, synthetic construct; identical to SEQ ID NO: 44810
  source 1..80: mol_type = other DNA

SEQ ID NO: 78443 - DNA, 80 bp, synthetic construct; identical to SEQ ID NO: 44811
  source 1..80: mol_type = other DNA

SEQ ID NO: 78444 - DNA, 80 bp, synthetic construct; identical to SEQ ID NO: 15069
  source 1..80: mol_type = other DNA

SEQ ID NO: 78445 - DNA, 80 bp, synthetic construct; identical to SEQ ID NO: 44814
  source 1..80: mol_type = other DNA

SEQ ID NO: 78446 - DNA, 80 bp, synthetic construct; identical to SEQ ID NO: 44815
  source 1..80: mol_type = other DNA

SEQ ID NO: 78447 - DNA, 80 bp, synthetic construct; identical to SEQ ID NO: 15070
  source 1..80: mol_type = other DNA

SEQ ID NO: 78448 - DNA, 80 bp, synthetic construct; identical to SEQ ID NO: 44817
  source 1..80: mol_type = other DNA

SEQ ID NO: 78449 - DNA, 80 bp, synthetic construct; identical to SEQ ID NO: 44818
  source 1..80: mol_type = other DNA

SEQ ID NO: 78450 - DNA, 80 bp, synthetic construct; identical to SEQ ID NO: 44819
  source 1..80: mol_type = other DNA

SEQ ID NO: 78451 - DNA, 80 bp, synthetic construct; identical to SEQ ID NO: 15071
  source 1..80: mol_type = other DNA

SEQ ID NO: 78452 - DNA, 80 bp, synthetic construct; identical to SEQ ID NO: 44821
  source 1..80: mol_type = other DNA

SEQ ID NO: 78453 - DNA, 80 bp, synthetic construct; identical to SEQ ID NO: 44822
  source 1..80: mol_type = other DNA

SEQ ID NO: 78454 - DNA, 80 bp, synthetic construct; identical to SEQ ID NO: 44823
  source 1..80: mol_type = other DNA

SEQ ID NO: 78455 - DNA, 80 bp, synthetic construct; identical to SEQ ID NO: 44824
  source 1..80: mol_type = other DNA

SEQ ID NO: 78456 - DNA, 80 bp, synthetic construct; identical to SEQ ID NO: 15072
  source 1..80: mol_type = other DNA

SEQ ID NO: 78457 - DNA, 80 bp, synthetic construct; identical to SEQ ID NO: 44827
  source 1..80: mol_type = other DNA

SEQ ID NO: 78458 - DNA, 80 bp, synthetic construct; identical to SEQ ID NO: 15073
  source 1..80: mol_type = other DNA

SEQ ID NO: 78459 - DNA, 80 bp, synthetic construct; identical to SEQ ID NO: 44829
  source 1..80: mol_type = other DNA

SEQ ID NO: 78460 - DNA, 80 bp, synthetic construct; identical to SEQ ID NO: 44830
  source 1..80: mol_type = other DNA

SEQ ID NO: 78461 - DNA, 80 bp, synthetic construct; identical to SEQ ID NO: 15074
  source 1..80: mol_type = other DNA

SEQ ID NO: 78462 - DNA, 80 bp, synthetic construct; identical to SEQ ID NO: 44832
  source 1..80: mol_type = other DNA

SEQ ID NO: 78463 - DNA, 80 bp, synthetic construct; identical to SEQ ID NO: 44833
  source 1..80: mol_type = other DNA

SEQ ID NO: 78464 - DNA, 80 bp, synthetic construct; identical to SEQ ID NO: 44834
  source 1..80: mol_type = other DNA

SEQ ID NO: 78465 - DNA, 80 bp, synthetic construct; identical to SEQ ID NO: 15075
  source 1..80: mol_type = other DNA

SEQ ID NO: 78466 - DNA, 80 bp, synthetic construct; identical to SEQ ID NO: 44836
  source 1..80: mol_type = other DNA

SEQ ID NO: 78467 - DNA, 80 bp, synthetic construct; identical to SEQ ID NO: 44837
  source 1..80: mol_type = other DNA

SEQ ID NO: 78468 - DNA, 80 bp, synthetic construct; identical to SEQ ID NO: 44838
  source 1..80: mol_type = other DNA

SEQ ID NO: 78469 - DNA, 80 bp, synthetic construct; identical to SEQ ID NO: 15076
  source 1..80: mol_type = other DNA

SEQ ID NO: 78470 - DNA, 80 bp, synthetic construct; identical to SEQ ID NO: 44840
  source 1..80: mol_type = other DNA

SEQ ID NO: 78471 - DNA, 80 bp, synthetic construct; identical to SEQ ID NO: 44841
  source 1..80: mol_type = other DNA

SEQ ID NO: 78472 - DNA, 80 bp, synthetic construct; identical to SEQ ID NO: 44842
  source 1..80: mol_type = other DNA

SEQ ID NO: 78473 - DNA, 80 bp, synthetic construct; identical to SEQ ID NO: 15077
  source 1..80: mol_type = other DNA

SEQ ID NO: 78474 - DNA, 80 bp, synthetic construct; identical to SEQ ID NO: 44844
  source 1..80: mol_type = other DNA

SEQ ID NO: 78475 - DNA, 80 bp, synthetic construct; identical to SEQ ID NO: 44846
  source 1..80: mol_type = other DNA

SEQ ID NO: 78476 - DNA, 80 bp, synthetic construct; identical to SEQ ID NO: 15078
  source 1..80: mol_type = other DNA

SEQ ID NO: 78477 - DNA, 80 bp, synthetic construct; identical to SEQ ID NO: 44848
  source 1..80: mol_type = other DNA

SEQ ID NO: 78478 - DNA, 80 bp, synthetic construct; identical to SEQ ID NO: 44849
  source 1..80: mol_type = other DNA

SEQ ID NO: 78479 - DNA, 80 bp, synthetic construct; identical to SEQ ID NO: 44850
  source 1..80: mol_type = other DNA

SEQ ID NO: 78480 - DNA, 80 bp, synthetic construct; identical to SEQ ID NO: 15079
  source 1..80: mol_type = other DNA

SEQ ID NO: 78481 - DNA, 80 bp, synthetic construct; identical to SEQ ID NO: 44854
  source 1..80: mol_type = other DNA

SEQ ID NO: 78482 - DNA, 80 bp, synthetic construct; identical to SEQ ID NO: 15080
  source 1..80: mol_type = other DNA

SEQ ID NO: 78483 - DNA, 80 bp, synthetic construct; identical to SEQ ID NO: 44857
  source 1..80: mol_type = other DNA

SEQ ID NO: 78484 - DNA, 80 bp, synthetic construct; identical to SEQ ID NO: 15081
  source 1..80: mol_type = other DNA

SEQ ID NO: 78485 - DNA, 80 bp, synthetic construct; identical to SEQ ID NO: 44860
  source 1..80: mol_type = other DNA

SEQ ID NO: 78486 - DNA, 80 bp, synthetic construct; identical to SEQ ID NO: 44861
  source 1..80: mol_type = other DNA

SEQ ID NO: 78487 - DNA, 80 bp, synthetic construct; identical to SEQ ID NO: 44862
  source 1..80: mol_type = other DNA

SEQ ID NO: 78488 - DNA, 80 bp, synthetic construct; identical to SEQ ID NO: 44863
  source 1..80: mol_type = other DNA

SEQ ID NO: 78489 - DNA, 80 bp, synthetic construct; identical to SEQ ID NO: 15082
  source 1..80: mol_type = other DNA

SEQ ID NO: 78490 - DNA, 80 bp, synthetic construct; identical to SEQ ID NO: 44865
  source 1..80: mol_type = other DNA

SEQ ID NO: 78491 - DNA, 80 bp, synthetic construct; identical to SEQ ID NO: 44866
  source 1..80: mol_type = other DNA

SEQ ID NO: 78492 - DNA, 80 bp, synthetic construct; identical to SEQ ID NO: 15083
  source 1..80: mol_type = other DNA

SEQ ID NO: 78493 - DNA, 80 bp, synthetic construct; identical to SEQ ID NO: 44868
  source 1..80: mol_type = other DNA

SEQ ID NO: 78494 - DNA, 80 bp, synthetic construct; identical to SEQ ID NO: 44869
  source 1..80: mol_type = other DNA

SEQ ID NO: 78495 - DNA, 80 bp, synthetic construct; identical to SEQ ID NO: 44870
  source 1..80: mol_type = other DNA

SEQ ID NO: 78496 - DNA, 80 bp, synthetic construct; identical to SEQ ID NO: 44871
  source 1..80: mol_type = other DNA

SEQ ID NO: 78497 - DNA, 80 bp, synthetic construct; identical to SEQ ID NO: 15084
  source 1..80: mol_type = other DNA

SEQ ID NO: 78498 - DNA, 80 bp, synthetic construct; identical to SEQ ID NO: 44873
  source 1..80: mol_type = other DNA

SEQ ID NO: 78499 - DNA, 80 bp, synthetic construct; identical to SEQ ID NO: 44874
  source 1..80: mol_type = other DNA

SEQ ID NO: 78500 - DNA, 80 bp, synthetic construct; identical to SEQ ID NO: 44875
  source 1..80: mol_type = other DNA

SEQ ID NO: 78501 - DNA, 80 bp, synthetic construct; identical to SEQ ID NO: 44876
  source 1..80: mol_type = other DNA

SEQ ID NO: 78502 - DNA, 80 bp, synthetic construct; identical to SEQ ID NO: 15085
  source 1..80: mol_type = other DNA

SEQ ID NO: 78503 - DNA, 80 bp, synthetic construct; identical to SEQ ID NO: 44878
  source 1..80: mol_type = other DNA

SEQ ID NO: 78504 - DNA, 80 bp, synthetic construct; identical to SEQ ID NO: 44879
  source 1..80: mol_type = other DNA

SEQ ID NO: 78505 - DNA, 80 bp, synthetic construct; identical to SEQ ID NO: 44880
  source 1..80: mol_type = other DNA

SEQ ID NO: 78506 - DNA, 80 bp, synthetic construct; identical to SEQ ID NO: 44881
  source 1..80: mol_type = other DNA

SEQ ID NO: 78507 - DNA, 80 bp, synthetic construct; identical to SEQ ID NO: 15086
  source 1..80: mol_type = other DNA

SEQ ID NO: 78508 - DNA, 80 bp, synthetic construct; identical to SEQ ID NO: 44883
  source 1..80: mol_type = other DNA

SEQ ID NO: 78509 - DNA, 80 bp, synthetic construct; identical to SEQ ID NO: 44884
  source 1..80: mol_type = other DNA

SEQ ID NO: 78510 - DNA, 80 bp, synthetic construct; identical to SEQ ID NO: 44885
  source 1..80: mol_type = other DNA

SEQ ID NO: 78511 - DNA, 80 bp, synthetic construct; identical to SEQ ID NO: 15087
  source 1..80: mol_type = other DNA

SEQ ID NO: 78512 - DNA, 80 bp, synthetic construct; identical to SEQ ID NO: 44887
  source 1..80: mol_type = other DNA

SEQ ID NO: 78513 - DNA, 80 bp, synthetic construct; identical to SEQ ID NO: 44889
  source 1..80: mol_type = other DNA

SEQ ID NO: 78514 - DNA, 80 bp, synthetic construct; identical to SEQ ID NO: 15088
  source 1..80: mol_type = other DNA

SEQ ID NO: 78515 - DNA, 80 bp, synthetic construct; identical to SEQ ID NO: 44891
  source 1..80: mol_type = other DNA

SEQ ID NO: 78516 - DNA, 80 bp, synthetic construct; identical to SEQ ID NO: 44893
  source 1..80: mol_type = other DNA

SEQ ID NO: 78517 - DNA, 80 bp, synthetic construct; identical to SEQ ID NO: 15089
  source 1..80: mol_type = other DNA

SEQ ID NO: 78518 - DNA, 80 bp, synthetic construct; identical to SEQ ID NO: 44896
  source 1..80: mol_type = other DNA

SEQ ID NO: 78519 - DNA, 80 bp, synthetic construct; identical to SEQ ID NO: 44897
  source 1..80: mol_type = other DNA

SEQ ID NO: 78520 - DNA, 80 bp, synthetic construct; identical to SEQ ID NO: 15090
  source 1..80: mol_type = other DNA

SEQ ID NO: 78521 - DNA, 80 bp, synthetic construct; identical to SEQ ID NO: 44900
  source 1..80: mol_type = other DNA

SEQ ID NO: 78522 - DNA, 80 bp, synthetic construct; identical to SEQ ID NO: 44901
  source 1..80: mol_type = other DNA

SEQ ID NO: 78523 - DNA, 80 bp, synthetic construct; identical to SEQ ID NO: 15091
  source 1..80: mol_type = other DNA

SEQ ID NO: 78524 - DNA, 80 bp, synthetic construct; identical to SEQ ID NO: 44903
  source 1..80: mol_type = other DNA

SEQ ID NO: 78525 - DNA, 80 bp, synthetic construct; identical to SEQ ID NO: 44904
  source 1..80: mol_type = other DNA

SEQ ID NO: 78526 - DNA, 80 bp, synthetic construct; identical to SEQ ID NO: 44905
  source 1..80: mol_type = other DNA

SEQ ID NO: 78527 - DNA, 80 bp, synthetic construct; identical to SEQ ID NO: 15092
  source 1..80: mol_type = other DNA

SEQ ID NO: 78528 - DNA, 80 bp, synthetic construct; identical to SEQ ID NO: 44907
  source 1..80: mol_type = other DNA

SEQ ID NO: 78529 - DNA, 80 bp, synthetic construct; identical to SEQ ID NO: 44908
  source 1..80: mol_type = other DNA

SEQ ID NO: 78530 - DNA, 80 bp, synthetic construct; identical to SEQ ID NO: 44909
  source 1..80: mol_type = other DNA

SEQ ID NO: 78531 - DNA, 80 bp, synthetic construct; identical to SEQ ID NO: 15093
  source 1..80: mol_type = other DNA

SEQ ID NO: 78532 - DNA, 80 bp, synthetic construct; identical to SEQ ID NO: 44911
  source 1..80: mol_type = other DNA

SEQ ID NO: 78533 - DNA, 80 bp, synthetic construct; identical to SEQ ID NO: 44912
  source 1..80: mol_type = other DNA

SEQ ID NO: 78534 - DNA, 80 bp, synthetic construct; identical to SEQ ID NO: 44913
  source 1..80: mol_type = other DNA

SEQ ID NO: 78535 - DNA, 80 bp, synthetic construct; identical to SEQ ID NO: 15094
  source 1..80: mol_type = other DNA

SEQ ID NO: 78536 - DNA, 80 bp, synthetic construct; identical to SEQ ID NO: 44915
  source 1..80: mol_type = other DNA

SEQ ID NO: 78537 - DNA, 80 bp, synthetic construct; identical to SEQ ID NO: 44916
  source 1..80: mol_type = other DNA

SEQ ID NO: 78538 - DNA, 80 bp, synthetic construct; identical to SEQ ID NO: 44917
  source 1..80: mol_type = other DNA

SEQ ID NO: 78539 - DNA, 80 bp, synthetic construct; identical to SEQ ID NO: 15095
  source 1..80: mol_type = other DNA

SEQ ID NO: 78540 - DNA, 80 bp, synthetic construct; identical to SEQ ID NO: 44919
  source 1..80: mol_type = other DNA

SEQ ID NO: 78541 - DNA, 80 bp, synthetic construct; identical to SEQ ID NO: 44920
  source 1..80: mol_type = other DNA

SEQ ID NO: 78542 - DNA, 80 bp, synthetic construct; identical to SEQ ID NO: 44921
  source 1..80: mol_type = other DNA

SEQ ID NO: 78543 - DNA, 80 bp, synthetic construct; identical to SEQ ID NO: 15096
  source 1..80: mol_type = other DNA

SEQ ID NO: 78544 - DNA, 80 bp, synthetic construct; identical to SEQ ID NO: 44923
  source 1..80: mol_type = other DNA

SEQ ID NO: 78545 - DNA, 80 bp, synthetic construct; identical to SEQ ID NO: 44924
  source 1..80: mol_type = other DNA

SEQ ID NO: 78546 - DNA, 80 bp, synthetic construct; identical to SEQ ID NO: 44925
  source 1..80: mol_type = other DNA

SEQ ID NO: 78547 - DNA, 80 bp, synthetic construct; identical to SEQ ID NO: 15097
  source 1..80: mol_type = other DNA

SEQ ID NO: 78548 - DNA, 80 bp, synthetic construct; identical to SEQ ID NO: 44927
  source 1..80: mol_type = other DNA

SEQ ID NO: 78549 - DNA, 80 bp, synthetic construct; identical to SEQ ID NO: 44928
  source 1..80: mol_type = other DNA

SEQ ID NO: 78550 - DNA, 80 bp, synthetic construct; identical to SEQ ID NO: 44929
  source 1..80: mol_type = other DNA

SEQ ID NO: 78551 - DNA, 80 bp, synthetic construct; identical to SEQ ID NO: 15098
  source 1..80: mol_type = other DNA

SEQ ID NO: 78552 - DNA, 80 bp, synthetic construct; identical to SEQ ID NO: 44931
  source 1..80: mol_type = other DNA

SEQ ID NO: 78553 - DNA, 80 bp, synthetic construct; identical to SEQ ID NO: 44932
  source 1..80: mol_type = other DNA

SEQ ID NO: 78554 - DNA, 80 bp, synthetic construct; identical to SEQ ID NO: 44933
  source 1..80: mol_type = other DNA

SEQ ID NO: 78555 - DNA, 80 bp, synthetic construct; identical to SEQ ID NO: 44934
  source 1..80: mol_type = other DNA

SEQ ID NO: 78556 - DNA, 80 bp, synthetic construct; identical to SEQ ID NO: 15099
  source 1..80: mol_type = other DNA

SEQ ID NO: 78557 - DNA, 80 bp, synthetic construct; identical to SEQ ID NO: 44937
  source 1..80: mol_type = other DNA

SEQ ID NO: 78558 - DNA, 80 bp, synthetic construct; identical to SEQ ID NO: 44938
  source 1..80: mol_type = other DNA

SEQ ID NO: 78559 - DNA, 80 bp, synthetic construct; identical to SEQ ID NO: 15100
  source 1..80: mol_type = other DNA

SEQ ID NO: 78560 - DNA, 80 bp, synthetic construct; identical to SEQ ID NO: 44940
  source 1..80: mol_type = other DNA

SEQ ID NO: 78561 - DNA, 80 bp, synthetic construct; identical to SEQ ID NO: 44941
  source 1..80: mol_type = other DNA

SEQ ID NO: 78562 - DNA, 80 bp, synthetic construct; identical to SEQ ID NO: 44942
  source 1..80: mol_type = other DNA

SEQ ID NO: 78563 - DNA, 80 bp, synthetic construct; identical to SEQ ID NO: 15101
  source 1..80: mol_type = other DNA

SEQ ID NO: 78564 - DNA, 80 bp, synthetic construct; identical to SEQ ID NO: 44944
  source 1..80: mol_type = other DNA

SEQ ID NO: 78565 - DNA, 80 bp, synthetic construct; identical to SEQ ID NO: 44945
  source 1..80: mol_type = other DNA

SEQ ID NO: 78566 - DNA, 80 bp, synthetic construct; identical to SEQ ID NO: 15102
  source 1..80: mol_type = other DNA

SEQ ID NO: 78567 - DNA, 80 bp, synthetic construct; identical to SEQ ID NO: 44947
  source 1..80: mol_type = other DNA

SEQ ID NO: 78568 - DNA, 80 bp, synthetic construct; identical to SEQ ID NO: 44948
  source 1..80: mol_type = other DNA

SEQ ID NO: 78569 - DNA, 80 bp, synthetic construct; identical to SEQ ID NO: 44949
  source 1..80: mol_type = other DNA

SEQ ID NO: 78570 - DNA, 80 bp, synthetic construct; identical to SEQ ID NO: 44950
  source 1..80: mol_type = other DNA

SEQ ID NO: 78571 - DNA, 80 bp, synthetic construct; identical to SEQ ID NO: 15103
  source 1..80: mol_type = other DNA

SEQ ID NO: 78572 - DNA, 80 bp, synthetic construct; identical to SEQ ID NO: 44952
  source 1..80: mol_type = other DNA

SEQ ID NO: 78573 - DNA, 80 bp, synthetic construct; identical to SEQ ID NO: 44953
  source 1..80: mol_type = other DNA

SEQ ID NO: 78574 - DNA, 80 bp, synthetic construct; identical to SEQ ID NO: 15104
  source 1..80: mol_type = other DNA

SEQ ID NO: 78575 - DNA, 80 bp, synthetic construct; identical to SEQ ID NO: 44955
  source 1..80: mol_type = other DNA

SEQ ID NO: 78576 - DNA, 80 bp, synthetic construct; identical to SEQ ID NO: 44956
  source 1..80: mol_type = other DNA

SEQ ID NO: 78577 - DNA, 80 bp, synthetic construct; identical to SEQ ID NO: 44957
  source 1..80: mol_type = other DNA

SEQ ID NO: 78578 - DNA, 80 bp, synthetic construct; identical to SEQ ID NO: 15105
  source 1..80: mol_type = other DNA

SEQ ID NO: 78579 - DNA, 80 bp, synthetic construct; identical to SEQ ID NO: 44959
  source 1..80: mol_type = other DNA

SEQ ID NO: 78580 - DNA, 80 bp, synthetic construct; identical to SEQ ID NO: 44960
  source 1..80: mol_type = other DNA

SEQ ID NO: 78581 - DNA, 80 bp, synthetic construct; identical to SEQ ID NO: 15106
  source 1..80: mol_type = other DNA

SEQ ID NO: 78582 - DNA, 80 bp, synthetic construct; identical to SEQ ID NO: 44962
  source 1..80: mol_type = other DNA

SEQ ID NO: 78583 - DNA, 80 bp, synthetic construct; identical to SEQ ID NO: 44963
  source 1..80: mol_type = other DNA

SEQ ID NO: 78584 - DNA, 80 bp, synthetic construct; identical to SEQ ID NO: 44965
  source 1..80: mol_type = other DNA

SEQ ID NO: 78585 - DNA, 80 bp, synthetic construct; identical to SEQ ID NO: 15107
  source 1..80: mol_type = other DNA

SEQ ID NO: 78586 - DNA, 80 bp, synthetic construct; identical to SEQ ID NO: 44967
  source 1..80: mol_type = other DNA

SEQ ID NO: 78587 - DNA, 80 bp, synthetic construct; identical to SEQ ID NO: 44968
  source 1..80: mol_type = other DNA

SEQ ID NO: 78588 - DNA, 80 bp, synthetic construct; identical to SEQ ID NO: 15108
  source 1..80: mol_type = other DNA

SEQ ID NO: 78589 - DNA, 80 bp, synthetic construct; identical to SEQ ID NO: 44970
  source 1..80: mol_type = other DNA

SEQ ID NO: 78590 - DNA, 80 bp, synthetic construct; identical to SEQ ID NO: 44971
  source 1..80: mol_type = other DNA

SEQ ID NO: 78591 - DNA, 80 bp, synthetic construct; identical to SEQ ID NO: 44972
  source 1..80: mol_type = other DNA

SEQ ID NO: 78592 - DNA, 80 bp, synthetic construct; identical to SEQ ID NO: 44973
  source 1..80: mol_type = other DNA

SEQ ID NO: 78593 - DNA, 80 bp, synthetic construct; identical to SEQ ID NO: 15109
  source 1..80: mol_type = other DNA

SEQ ID NO: 78594 - DNA, 80 bp, synthetic construct; identical to SEQ ID NO: 44975
  source 1..80: mol_type = other DNA

SEQ ID NO: 78595 - DNA, 80 bp, synthetic construct; identical to SEQ ID NO: 44977
  source 1..80: mol_type = other DNA

SEQ ID NO: 78596 - DNA, 80 bp, synthetic construct; identical to SEQ ID NO: 15110
  source 1..80: mol_type = other DNA

SEQ ID NO: 78597 - DNA, 80 bp, synthetic construct; identical to SEQ ID NO: 44979
  source 1..80: mol_type = other DNA

SEQ ID NO: 78598 - DNA, 80 bp, synthetic construct; identical to SEQ ID NO: 44980
  source 1..80: mol_type = other DNA

SEQ ID NO: 78599 - DNA, 80 bp, synthetic construct; identical to SEQ ID NO: 15111
  source 1..80: mol_type = other DNA

SEQ ID NO: 78600 - DNA, 80 bp, synthetic construct; identical to SEQ ID NO: 44982
  source 1..80: mol_type = other DNA

SEQ ID NO: 78601 - DNA, 80 bp, synthetic construct; identical to SEQ ID NO: 44983
  source 1..80: mol_type = other DNA

SEQ ID NO: 78602 - DNA, 80 bp, synthetic construct; identical to SEQ ID NO: 44985
  source 1..80: mol_type = other DNA

SEQ ID NO: 78603 - DNA, 80 bp, synthetic construct; identical to SEQ ID NO: 15112
  source 1..80: mol_type = other DNA

SEQ ID NO: 78604 - DNA, 80 bp, synthetic construct; identical to SEQ ID NO: 44987
  source 1..80: mol_type = other DNA

SEQ ID NO: 78605 - DNA, 80 bp, synthetic construct; identical to SEQ ID NO: 44988
  source 1..80: mol_type = other DNA

SEQ ID NO: 78606 - DNA, 80 bp, synthetic construct; identical to SEQ ID NO: 15113
  source 1..80: mol_type = other DNA

SEQ ID NO: 78607 - DNA, 80 bp, synthetic construct; identical to SEQ ID NO: 44990
  source 1..80: mol_type = other DNA

SEQ ID NO: 78608 - DNA, 80 bp, synthetic construct; identical to SEQ ID NO: 44991
  source 1..80: mol_type = other DNA

SEQ ID NO: 78609 - DNA, 80 bp, synthetic construct; identical to SEQ ID NO: 44992
  source 1..80: mol_type = other DNA

SEQ ID NO: 78610 - DNA, 80 bp, synthetic construct; identical to SEQ ID NO: 15114
  source 1..80: mol_type = other DNA

SEQ ID NO: 78611 - DNA, 80 bp, synthetic construct; identical to SEQ ID NO: 44994
  source 1..80: mol_type = other DNA

SEQ ID NO: 78612 - DNA, 80 bp, synthetic construct; identical to SEQ ID NO: 44995
  source 1..80: mol_type = other DNA

SEQ ID NO: 78613 - DNA, 80 bp, synthetic construct; identical to SEQ ID NO: 44996
  source 1..80: mol_type = other DNA

SEQ ID NO: 78614 - DNA, 80 bp, synthetic construct; identical to SEQ ID NO: 15115
  source 1..80: mol_type = other DNA

SEQ ID NO: 78615 - DNA, 80 bp, synthetic construct; identical to SEQ ID NO: 44998
  source 1..80: mol_type = other DNA

SEQ ID NO: 78616 - DNA, 80 bp, synthetic construct; identical to SEQ ID NO: 44999
  source 1..80: mol_type = other DNA

SEQ ID NO: 78617 - DNA, 80 bp, synthetic construct; identical to SEQ ID NO: 45000
  source 1..80: mol_type = other DNA

SEQ ID NO: 78618 - DNA, 80 bp, synthetic construct; identical to SEQ ID NO: 15116
  source 1..80: mol_type = other DNA

SEQ ID NO: 78619 - DNA, 80 bp, synthetic construct; identical to SEQ ID NO: 45002
  source 1..80: mol_type = other DNA

SEQ ID NO: 78620 - DNA, 80 bp, synthetic construct; identical to SEQ ID NO: 45003
  source 1..80: mol_type = other DNA

SEQ ID NO: 78621 - DNA, 80 bp, synthetic construct; identical to SEQ ID NO: 45004
  source 1..80: mol_type = other DNA

SEQ ID NO: 78622 - DNA, 80 bp, synthetic construct; identical to SEQ ID NO: 45005
  source 1..80: mol_type = other DNA

SEQ ID NO: 78623 - DNA, 80 bp, synthetic construct; identical to SEQ ID NO: 15117
  source 1..80: mol_type = other DNA

SEQ ID NO: 78624 - DNA, 80 bp, synthetic construct; identical to SEQ ID NO: 45007
  source 1..80: mol_type = other DNA

SEQ ID NO: 78625 - DNA, 80 bp, synthetic construct; identical to SEQ ID NO: 45008
  source 1..80: mol_type = other DNA

SEQ ID NO: 78626 - DNA, 80 bp, synthetic construct; identical to SEQ ID NO: 45009
  source 1..80: mol_type = other DNA

SEQ ID NO: 78627 - DNA, 80 bp, synthetic construct; identical to SEQ ID NO: 15118
  source 1..80: mol_type = other DNA

SEQ ID NO: 78628 - DNA, 80 bp, synthetic construct; identical to SEQ ID NO: 45011
  source 1..80: mol_type = other DNA

SEQ ID NO: 78629 - DNA, 80 bp, synthetic construct; identical to SEQ ID NO: 45012
  source 1..80: mol_type = other DNA

SEQ ID NO: 78630 - DNA, 80 bp, synthetic construct; identical to SEQ ID NO: 45013
  source 1..80: mol_type = other DNA

SEQ ID NO: 78631 - DNA, 80 bp, synthetic construct; identical to SEQ ID NO: 15119
  source 1..80: mol_type = other DNA

SEQ ID NO: 78632 - DNA, 80 bp, synthetic construct; identical to SEQ ID NO: 45015
  source 1..80: mol_type = other DNA

SEQ ID NO: 78633 - DNA, 80 bp, synthetic construct; identical to SEQ ID NO: 45016
  source 1..80: mol_type = other DNA

SEQ ID NO: 78634 - DNA, 80 bp, synthetic construct; identical to SEQ ID NO: 15120
  source 1..80: mol_type = other DNA

SEQ ID NO: 78635 - DNA, 80 bp, synthetic construct; identical to SEQ ID NO: 45019
  source 1..80: mol_type = other DNA

SEQ ID NO: 78636 - DNA, 80 bp, synthetic construct; identical to SEQ ID NO: 45020
  source 1..80: mol_type = other DNA

SEQ ID NO: 78637 - DNA, 80 bp, synthetic construct; identical to SEQ ID NO: 45021
  source 1..80: mol_type = other DNA

SEQ ID NO: 78638 - DNA, 80 bp, synthetic construct; identical to SEQ ID NO: 15121
  source 1..80: mol_type = other DNA

SEQ ID NO: 78639 - DNA, 80 bp, synthetic construct; identical to SEQ ID NO: 45023
  source 1..80: mol_type = other DNA

SEQ ID NO: 78640 - DNA, 80 bp, synthetic construct; identical to SEQ ID NO: 45024
  source 1..80: mol_type = other DNA

SEQ ID NO: 78641 - DNA, 80 bp, synthetic construct; identical to SEQ ID NO: 45025
  source 1..80: mol_type = other DNA

SEQ ID NO: 78642 - DNA, 80 bp, synthetic construct; identical to SEQ ID NO: 15122
  source 1..80: mol_type = other DNA

SEQ ID NO: 78643 - DNA, 80 bp, synthetic construct; identical to SEQ ID NO: 45027
  source 1..80: mol_type = other DNA

SEQ ID NO: 78644 - DNA, 80 bp, synthetic construct; identical to SEQ ID NO: 45028
  source 1..80: mol_type = other DNA

SEQ ID NO: 78645 - DNA, 80 bp, synthetic construct; identical to SEQ ID NO: 45029
  source 1..80: mol_type = other DNA

SEQ ID NO: 78646 - DNA, 80 bp, synthetic construct; identical to SEQ ID NO: 15123
  source 1..80: mol_type = other DNA

SEQ ID NO: 78647 - DNA, 80 bp, synthetic construct; identical to SEQ ID NO: 45031
  source 1..80: mol_type = other DNA

SEQ ID NO: 78648 - DNA, 80 bp, synthetic construct; identical to SEQ ID NO: 45032
  source 1..80: mol_type = other DNA

SEQ ID NO: 78649 - DNA, 80 bp, synthetic construct; identical to SEQ ID NO: 15124
  source 1..80: mol_type = other DNA

SEQ ID NO: 78650 - DNA, 80 bp, synthetic construct; identical to SEQ ID NO: 45035
  source 1..80: mol_type = other DNA

SEQ ID NO: 78651 - DNA, 80 bp, synthetic construct; identical to SEQ ID NO: 45036
  source 1..80: mol_type = other DNA

SEQ ID NO: 78652 - DNA, 80 bp, synthetic construct; identical to SEQ ID NO: 15125
  source 1..80: mol_type = other DNA

SEQ ID NO: 78653 - DNA, 80 bp, synthetic construct; identical to SEQ ID NO: 45038
  source 1..80: mol_type = other DNA

SEQ ID NO: 78654 - DNA, 80 bp, synthetic construct; identical to SEQ ID NO: 45039
  source 1..80: mol_type = other DNA

SEQ ID NO: 78655 - DNA, 80 bp, synthetic construct; identical to SEQ ID NO: 45040
  source 1..80: mol_type = other DNA

SEQ ID NO: 78656 - DNA, 80 bp, synthetic construct; identical to SEQ ID NO: 15126
  source 1..80: mol_type = other DNA

SEQ ID NO: 78657 - DNA, 80 bp, synthetic construct; identical to SEQ ID NO: 45043
  source 1..80: mol_type = other DNA

SEQ ID NO: 78658 - DNA, 80 bp, synthetic construct; identical to SEQ ID NO: 45044
  source 1..80: mol_type = other DNA

SEQ ID NO: 78659 - DNA, 80 bp, synthetic construct; identical to SEQ ID NO: 15127
  source 1..80: mol_type = other DNA

SEQ ID NO: 78660 - DNA, 80 bp, synthetic construct; identical to SEQ ID NO: 45047
  source 1..80: mol_type = other DNA

SEQ ID NO: 78661 - DNA, 80 bp, synthetic construct; identical to SEQ ID NO: 45048
  source 1..80: mol_type = other DNA

SEQ ID NO: 78662 - DNA, 80 bp, synthetic construct; identical to SEQ ID NO: 15128
  source 1..80: mol_type = other DNA

SEQ ID NO: 78663 - DNA, 80 bp, synthetic construct; identical to SEQ ID NO: 45050
  source 1..80: mol_type = other DNA

SEQ ID NO: 78664 - DNA, 80 bp, synthetic construct; identical to SEQ ID NO: 45051
  source 1..80: mol_type = other DNA

SEQ ID NO: 78665 - DNA, 80 bp, synthetic construct; identical to SEQ ID NO: 15129
  source 1..80: mol_type = other DNA

SEQ ID NO: 78666 - DNA, 80 bp, synthetic construct; identical to SEQ ID NO: 45054
  source 1..80: mol_type = other DNA

SEQ ID NO: 78667 - DNA, 80 bp, synthetic construct; identical to SEQ ID NO: 45055
  source 1..80: mol_type = other DNA

SEQ ID NO: 78668 - DNA, 80 bp, synthetic construct; identical to SEQ ID NO: 45056
  source 1..80: mol_type = other DNA

SEQ ID NO: 78669 - DNA, 80 bp, synthetic construct; identical to SEQ ID NO: 15130
  source 1..80: mol_type = other DNA

SEQ ID NO: 78670 - DNA, 80 bp, synthetic construct; identical to SEQ ID NO: 45058
  source 1..80: mol_type = other DNA

SEQ ID NO: 78671 - DNA, 80 bp, synthetic construct; identical to SEQ ID NO: 45059
  source 1..80: mol_type = other DNA

SEQ ID NO: 78672 - DNA, 80 bp, synthetic construct; identical to SEQ ID NO: 45060
  source 1..80: mol_type = other DNA

SEQ ID NO: 78673 - DNA, 80 bp, synthetic construct; identical to SEQ ID NO: 15131
  source 1..80: mol_type = other DNA

SEQ ID NO: 78674 - DNA, 80 bp, synthetic construct; identical to SEQ ID NO: 45062
  source 1..80: mol_type = other DNA

SEQ ID NO: 78675 - DNA, 80 bp, synthetic construct; identical to SEQ ID NO: 45063
  source 1..80: mol_type = other DNA

SEQ ID NO: 78676 - DNA, 80 bp, synthetic construct; identical to SEQ ID NO: 15132
  source 1..80: mol_type = other DNA

SEQ ID NO: 78677 - DNA, 80 bp, synthetic construct; identical to SEQ ID NO: 45066
  source 1..80: mol_type = other DNA

SEQ ID NO: 78678 - DNA, 80 bp, synthetic construct; identical to SEQ ID NO: 45067
  source 1..80: mol_type = other DNA

SEQ ID NO: 78679 - DNA, 80 bp, synthetic construct; identical to SEQ ID NO: 15133
  source 1..80: mol_type = other DNA

SEQ ID NO: 78680 - DNA, 80 bp, synthetic construct; identical to SEQ ID NO: 45069
  source 1..80: mol_type = other DNA

SEQ ID NO: 78681 - DNA, 80 bp, synthetic construct; identical to SEQ ID NO: 45070
  source 1..80: mol_type = other DNA

SEQ ID NO: 78682 - DNA, 80 bp, synthetic construct; identical to SEQ ID NO: 45071
  source 1..80: mol_type = other DNA

SEQ ID NO: 78683 - DNA, 80 bp, synthetic construct; identical to SEQ ID NO: 15134
  source 1..80: mol_type = other DNA

SEQ ID NO: 78684 - DNA, 80 bp, synthetic construct; identical to SEQ ID NO: 45073
  source 1..80: mol_type = other DNA

SEQ ID NO: 78685 - DNA, 80 bp, synthetic construct; identical to SEQ ID NO: 45074
  source 1..80: mol_type = other DNA

SEQ ID NO: 78686 - DNA, 80 bp, synthetic construct; identical to SEQ ID NO: 45075
  source 1..80: mol_type = other DNA

SEQ ID NO: 78687 - DNA, 80 bp, synthetic construct; identical to SEQ ID NO: 45076
  source 1..80: mol_type = other DNA

SEQ ID NO: 78688 - DNA, 80 bp, synthetic construct; identical to SEQ ID NO: 45077
  source 1..80: mol_type = other DNA

SEQ ID NO: 78689 - DNA, 80 bp, synthetic construct; identical to SEQ ID NO: 15135
  source 1..80: mol_type = other DNA

SEQ ID NO: 78690 - DNA, 80 bp, synthetic construct; identical to SEQ ID NO: 45079
  source 1..80: mol_type = other DNA

SEQ ID NO: 78691 - DNA, 80 bp, synthetic construct; identical to SEQ ID NO: 45080
  source 1..80: mol_type = other DNA

SEQ ID NO: 78692 - DNA, 80 bp, synthetic construct; identical to SEQ ID NO: 15136
  source 1..80: mol_type = other DNA

SEQ ID NO: 78693 - DNA, 80 bp, synthetic construct; identical to SEQ ID NO: 45082
  source 1..80: mol_type = other DNA

SEQ ID NO: 78694 - DNA, 80 bp, synthetic construct; identical to SEQ ID NO: 45083
  source 1..80: mol_type = other DNA

SEQ ID NO: 78695 - DNA, 80 bp, synthetic construct; identical to SEQ ID NO: 45084
  source 1..80: mol_type = other DNA

SEQ ID NO: 78696 - DNA, 80 bp, synthetic construct; identical to SEQ ID NO: 45085
  source 1..80: mol_type = other DNA

SEQ ID NO: 78697 - DNA, 80 bp, synthetic construct; identical to SEQ ID NO: 15137
  source 1..80: mol_type = other DNA

SEQ ID NO: 78698 - DNA, 80 bp, synthetic construct; identical to SEQ ID NO: 45087
  source 1..80: mol_type = other DNA

SEQ ID NO: 78699 - DNA, 80 bp, synthetic construct; identical to SEQ ID NO: 45088
  source 1..80: mol_type = other DNA

SEQ ID NO: 78700 - DNA, 80 bp, synthetic construct; identical to SEQ ID NO: 45089
  source 1..80: mol_type = other DNA

SEQ ID NO: 78701 - DNA, 80 bp, synthetic construct; identical to SEQ ID NO: 15138
  source 1..80: mol_type = other DNA

SEQ ID NO: 78702 - DNA, 80 bp, synthetic construct; identical to SEQ ID NO: 45091
  source 1..80: mol_type = other DNA

SEQ ID NO: 78703 - DNA, 80 bp, synthetic construct; identical to SEQ ID NO: 45092
  source 1..80: mol_type = other DNA

SEQ ID NO: 78704 - DNA, 80 bp, synthetic construct; identical to SEQ ID NO: 15139
  source 1..80: mol_type = other DNA

SEQ ID NO: 78705 - DNA, 80 bp, synthetic construct; identical to SEQ ID NO: 45094
  source 1..80: mol_type = other DNA

SEQ ID NO: 78706 - DNA, 80 bp, synthetic construct; identical to SEQ ID NO: 45095
  source 1..80: mol_type = other DNA

SEQ ID NO: 78707 - DNA, 80 bp, synthetic construct; identical to SEQ ID NO: 45096
  source 1..80: mol_type = other DNA

SEQ ID NO: 78708 - DNA, 80 bp, synthetic construct; identical to SEQ ID NO: 15140
  source 1..80: mol_type = other DNA

SEQ ID NO: 78709 - DNA, 80 bp, synthetic construct; identical to SEQ ID NO: 45098
  source 1..80: mol_type = other DNA

SEQ ID NO: 78710 - DNA, 80 bp, synthetic construct; identical to SEQ ID NO: 45099
  source 1..80: mol_type = other DNA

SEQ ID NO: 78711 - DNA, 80 bp, synthetic construct; identical to SEQ ID NO: 45100
  source 1..80: mol_type = other DNA

SEQ ID NO: 78712 - DNA, 80 bp, synthetic construct; identical to SEQ ID NO: 15141
  source 1..80: mol_type = other DNA

SEQ ID NO: 78713 - DNA, 80 bp, synthetic construct; identical to SEQ ID NO: 45102
  source 1..80: mol_type = other DNA

SEQ ID NO: 78714 - DNA, 80 bp, synthetic construct; identical to SEQ ID NO: 45103
  source 1..80: mol_type = other DNA

SEQ ID NO: 78715 - DNA, 80 bp, synthetic construct; identical to SEQ ID NO: 45104
  source 1..80: mol_type = other DNA

SEQ ID NO: 78716 - DNA, 80 bp, synthetic construct; identical to SEQ ID NO: 45105
  source 1..80: mol_type = other DNA

SEQ ID NO: 78717 - DNA, 80 bp, synthetic construct; identical to SEQ ID NO: 15142
  source 1..80: mol_type = other DNA

SEQ ID NO: 78718 - DNA, 80 bp, synthetic construct; identical to SEQ ID NO: 45107
  source 1..80: mol_type = other DNA

SEQ ID NO: 78719 - DNA, 80 bp, synthetic construct; identical to SEQ ID NO: 45108
  source 1..80: mol_type = other DNA

SEQ ID NO: 78720 - DNA, 80 bp, synthetic construct; identical to SEQ ID NO: 45109
  source 1..80: mol_type = other DNA

SEQ ID NO: 78721 - DNA, 80 bp, synthetic construct; identical to SEQ ID NO: 15143
  source 1..80: mol_type = other DNA

SEQ ID NO: 78722 - DNA, 80 bp, synthetic construct; identical to SEQ ID NO: 45111
  source 1..80: mol_type = other DNA

SEQ ID NO: 78723 - DNA, 80 bp, synthetic construct; identical to SEQ ID NO: 45112
  source 1..80: mol_type = other DNA

SEQ ID NO: 78724 - DNA, 80 bp, synthetic construct; identical to SEQ ID NO: 45113
  source 1..80: mol_type = other DNA

SEQ ID NO: 78725 - DNA, 80 bp, synthetic construct; identical to SEQ ID NO: 15144
  source 1..80: mol_type = other DNA

SEQ ID NO: 78726 - DNA, 80 bp, synthetic construct; identical to SEQ ID NO: 45115
  source 1..80: mol_type = other DNA

SEQ ID NO: 78727 - DNA, 80 bp, synthetic construct; identical to SEQ ID NO: 45116
  source 1..80: mol_type = other DNA

SEQ ID NO: 78728 - DNA, 80 bp, synthetic construct; identical to SEQ ID NO: 15145
  source 1..80: mol_type = other DNA

SEQ ID NO: 78729 - DNA, 80 bp, synthetic construct; identical to SEQ ID NO: 45118
  source 1..80: mol_type = other DNA

SEQ ID NO: 78730 - DNA, 80 bp, synthetic construct; identical to SEQ ID NO: 45119
  source 1..80: mol_type = other DNA

SEQ ID NO: 78731 - DNA, 80 bp, synthetic construct; identical to SEQ ID NO: 45120
  source 1..80: mol_type = other DNA

SEQ ID NO: 78732 - DNA, 80 bp, synthetic construct; identical to SEQ ID NO: 45121
  source 1..80: mol_type = other DNA

SEQ ID NO: 78733 - DNA, 80 bp, synthetic construct; identical to SEQ ID NO: 45122
  source 1..80: mol_type = other DNA

SEQ ID NO: 78734 - DNA, 80 bp, synthetic construct; identical to SEQ ID NO: 15146
  source 1..80: mol_type = other DNA

SEQ ID NO: 78735 - DNA, 80 bp, synthetic construct; identical to SEQ ID NO: 45124
  source 1..80: mol_type = other DNA

SEQ ID NO: 78736 - DNA, 80 bp, synthetic construct; identical to SEQ ID NO: 45125
  source 1..80: mol_type = other DNA

SEQ ID NO: 78737 - DNA, 80 bp, synthetic construct; identical to SEQ ID NO: 45126
  source 1..80: mol_type = other DNA

SEQ ID NO: 78738 - DNA, 80 bp, synthetic construct; identical to SEQ ID NO: 15147
  source 1..80: mol_type = other DNA

SEQ ID NO: 78739 - DNA, 80 bp, synthetic construct; identical to SEQ ID NO: 45128
  source 1..80: mol_type = other DNA

SEQ ID NO: 78740 - DNA, 80 bp, synthetic construct; identical to SEQ ID NO: 45129
  source 1..80: mol_type = other DNA

SEQ ID NO: 78741 - DNA, 80 bp, synthetic construct; identical to SEQ ID NO: 45130
  source 1..80: mol_type = other DNA

SEQ ID NO: 78742 - DNA, 80 bp, synthetic construct; identical to SEQ ID NO: 15148
  source 1..80: mol_type = other DNA

SEQ ID NO: 78743 - DNA, 80 bp, synthetic construct; identical to SEQ ID NO: 45132
  source 1..80: mol_type = other DNA

SEQ ID NO: 78744 - DNA, 80 bp, synthetic construct; identical to SEQ ID NO: 45133
  source 1..80: mol_type = other DNA

SEQ ID NO: 78745 - DNA, 80 bp, synthetic construct; identical to SEQ ID NO: 45134
  source 1..80: mol_type = other DNA

SEQ ID NO: 78746 - DNA, 80 bp, synthetic construct; identical to SEQ ID NO: 15149
  source 1..80: mol_type = other DNA

SEQ ID NO: 78747 - DNA, 80 bp, synthetic construct; identical to SEQ ID NO: 45136
  source 1..80: mol_type = other DNA

SEQ ID NO: 78748 - DNA, 80 bp, synthetic construct; identical to SEQ ID NO: 45137
  source 1..80: mol_type = other DNA

SEQ ID NO: 78749 - DNA, 80 bp, synthetic construct; identical to SEQ ID NO: 15150
  source 1..80: mol_type = other DNA

SEQ ID NO: 78750 - DNA, 80 bp, synthetic construct; identical to SEQ ID NO: 45139
  source 1..80: mol_type = other DNA

SEQ ID NO: 78751 - DNA, 80 bp, synthetic construct; identical to SEQ ID NO: 45140
  source 1..80: mol_type = other DNA

SEQ ID NO: 78752 - DNA, 80 bp, synthetic construct; identical to SEQ ID NO: 45141
  source 1..80: mol_type = other DNA

SEQ ID NO: 78753 - DNA, 80 bp, synthetic construct; identical to SEQ ID NO: 15151
  source 1..80: mol_type = other DNA

SEQ ID NO: 78754 - DNA, 80 bp, synthetic construct; identical to SEQ ID NO: 45143
  source 1..80: mol_type = other DNA

SEQ ID NO: 78755 - DNA, 80 bp, synthetic construct; identical to SEQ ID NO: 45144
  source 1..80: mol_type = other DNA

SEQ ID NO: 78756 - DNA, 80 bp, synthetic construct; identical to SEQ ID NO: 45145
  source 1..80: mol_type = other DNA

SEQ ID NO: 78757 - DNA, 80 bp, synthetic construct; identical to SEQ ID NO: 45146
  source 1..80: mol_type = other DNA

SEQ ID NO: 78758 - DNA, 80 bp, synthetic construct; identical to SEQ ID NO: 15152
  source 1..80: mol_type = other DNA

SEQ ID NO: 78759 - DNA, 80 bp, synthetic construct; identical to SEQ ID NO: 45148
  source 1..80: mol_type = other DNA

SEQ ID NO: 78760 - DNA, 80 bp, synthetic construct; identical to SEQ ID NO: 45149
  source 1..80: mol_type = other DNA

SEQ ID NO: 78761 - DNA, 80 bp, synthetic construct; identical to SEQ ID NO: 15153
  source 1..80: mol_type = other DNA

SEQ ID NO: 78762 - DNA, 80 bp, synthetic construct; identical to SEQ ID NO: 45151
  source 1..80: mol_type = other DNA

SEQ ID NO: 78763 - DNA, 80 bp, synthetic construct; identical to SEQ ID NO: 45152
  source 1..80: mol_type = other DNA

SEQ ID NO: 78764 - DNA, 80 bp, synthetic construct; identical to SEQ ID NO: 45153
  source 1..80: mol_type = other DNA

SEQ ID NO: 78765 - DNA, 80 bp, synthetic construct; identical to SEQ ID NO: 15154
  source 1..80: mol_type = other DNA

SEQ ID NO: 78766 - DNA, 80 bp, synthetic construct; identical to SEQ ID NO: 45156
  source 1..80: mol_type = other DNA

SEQ ID NO: 78767 - DNA, 80 bp, synthetic construct; identical to SEQ ID NO: 45157
  source 1..80: mol_type = other DNA

SEQ ID NO: 78768 - DNA, 80 bp, synthetic construct; identical to SEQ ID NO: 15155
  source 1..80: mol_type = other DNA

SEQ ID NO: 78769 - DNA, 80 bp, synthetic construct; identical to SEQ ID NO: 45159
  source 1..80: mol_type = other DNA

SEQ ID NO: 78770 - DNA, 80 bp, synthetic construct; identical to SEQ ID NO: 45160
  source 1..80: mol_type = other DNA

SEQ ID NO: 78771 - DNA, 80 bp, synthetic construct; identical to SEQ ID NO: 45161
  source 1..80: mol_type = other DNA

SEQ ID NO: 78772 - DNA, 80 bp, synthetic construct; identical to SEQ ID NO: 15156
  source 1..80: mol_type = other DNA

SEQ ID NO: 78773 - DNA, 80 bp, synthetic construct; identical to SEQ ID NO: 45164
  source 1..80: mol_type = other DNA

SEQ ID NO: 78774 - DNA, 80 bp, synthetic construct; identical to SEQ ID NO: 45165
  source 1..80: mol_type = other DNA

SEQ ID NO: 78775 - DNA, 80 bp, synthetic construct; identical to SEQ ID NO: 15157
  source 1..80: mol_type = other DNA

SEQ ID NO: 78776 - DNA, 80 bp, synthetic construct; identical to SEQ ID NO: 45169
  source 1..80: mol_type = other DNA

SEQ ID NO: 78777 - DNA, 80 bp, synthetic construct; identical to SEQ ID NO: 15158
  source 1..80: mol_type = other DNA

SEQ ID NO: 78778 - DNA, 80 bp, synthetic construct; identical to SEQ ID NO: 45172
  source 1..80: mol_type = other DNA

SEQ ID NO: 78779 - DNA, 80 bp, synthetic construct; identical to SEQ ID NO: 45173
  source 1..80: mol_type = other DNA

SEQ ID NO: 78780 - DNA, 80 bp, synthetic construct; identical to SEQ ID NO: 15159
  source 1..80: mol_type = other DNA

SEQ ID NO: 78781 - DNA, 80 bp, synthetic construct; identical to SEQ ID NO: 45176
  source 1..80: mol_type = other DNA

SEQ ID NO: 78782 - DNA, 80 bp, synthetic construct; identical to SEQ ID NO: 45177
  source 1..80: mol_type = other DNA

SEQ ID NO: 78783 - DNA, 80 bp, synthetic construct; identical to SEQ ID NO: 15160
  source 1..80: mol_type = other DNA

SEQ ID NO: 78784 - DNA, 80 bp, synthetic construct; identical to SEQ ID NO: 45180
  source 1..80: mol_type = other DNA

SEQ ID NO: 78785 - DNA, 80 bp, synthetic construct; identical to SEQ ID NO: 45181
  source 1..80: mol_type = other DNA

SEQ ID NO: 78786 - DNA, 80 bp, synthetic construct; identical to SEQ ID NO: 15161
  source 1..80: mol_type = other DNA

SEQ ID NO: 78787 - DNA, 80 bp, synthetic construct; identical to SEQ ID NO: 45183
  source 1..80: mol_type = other DNA

SEQ ID NO: 78788 - DNA, 80 bp, synthetic construct; identical to SEQ ID NO: 45184
  source 1..80: mol_type = other DNA

SEQ ID NO: 78789 - DNA, 80 bp, synthetic construct; identical to SEQ ID NO: 15162
  source 1..80: mol_type = other DNA

SEQ ID NO: 78790 - DNA, 80 bp, synthetic construct; identical to SEQ ID NO: 45187
  source 1..80: mol_type = other DNA

SEQ ID NO: 78791 - DNA, 80 bp, synthetic construct; identical to SEQ ID NO: 45188
  source 1..80: mol_type = other DNA

SEQ ID NO: 78792 - DNA, 80 bp, synthetic construct; identical to SEQ ID NO: 45189
  source 1..80: mol_type = other DNA

SEQ ID NO: 78793 - DNA, 80 bp, synthetic construct; identical to SEQ ID NO: 45190
  source 1..80: mol_type = other DNA

SEQ ID NO: 78794 - DNA, 80 bp, synthetic construct; identical to SEQ ID NO: 15163
  source 1..80: mol_type = other DNA

SEQ ID NO: 78795 - DNA, 80 bp, synthetic construct; identical to SEQ ID NO: 45192
  source 1..80: mol_type = other DNA

SEQ ID NO: 78796 - DNA, 80 bp, synthetic construct; identical to SEQ ID NO: 45193
  source 1..80: mol_type = other DNA

SEQ ID NO: 78797 - DNA, 80 bp, synthetic construct; identical to SEQ ID NO: 45194
  source 1..80: mol_type = other DNA

SEQ ID NO: 78798 - DNA, 80 bp, synthetic construct; identical to SEQ ID NO: 15164
  source 1..80: mol_type = other DNA

SEQ ID NO: 78799 - DNA, 80 bp, synthetic construct; identical to SEQ ID NO: 45196
  source 1..80: mol_type = other DNA

SEQ ID NO: 78800 - DNA, 80 bp, synthetic construct; identical to SEQ ID NO: 45197
  source 1..80: mol_type = other DNA

SEQ ID NO: 78801 - DNA, 80 bp, synthetic construct; identical to SEQ ID NO: 15165
  source 1..80: mol_type = other DNA

SEQ ID NO: 78802 - DNA, 80 bp, synthetic construct; identical to SEQ ID NO: 45200
  source 1..80: mol_type = other DNA

SEQ ID NO: 78803 - DNA, 80 bp, synthetic construct; identical to SEQ ID NO: 45201
  source 1..80: mol_type = other DNA

SEQ ID NO: 78804 - DNA, 80 bp, synthetic construct; identical to SEQ ID NO: 15166
  source 1..80: mol_type = other DNA

SEQ ID NO: 78805 - DNA, 80 bp, synthetic construct; identical to SEQ ID NO: 45203
  source 1..80: mol_type = other DNA

SEQ ID NO: 78806 - DNA, 80 bp, synthetic construct; identical to SEQ ID NO: 45204
  source 1..80: mol_type = other DNA

SEQ ID NO: 78807 - DNA, 80 bp, synthetic construct; identical to SEQ ID NO: 45205
  source 1..80: mol_type = other DNA

SEQ ID NO: 78808 - DNA, 80 bp, synthetic construct; identical to SEQ ID NO: 15167
  source 1..80: mol_type = other DNA

SEQ ID NO: 78809 - DNA, 80 bp, synthetic construct; identical to SEQ ID NO: 45207
  source 1..80: mol_type = other DNA

SEQ ID NO: 78810 - DNA, 80 bp, synthetic construct; identical to SEQ ID NO: 45208
  source 1..80: mol_type = other DNA

SEQ ID NO: 78811 - DNA, 80 bp, synthetic construct; identical to SEQ ID NO: 45209
  source 1..80: mol_type = other DNA

SEQ ID NO: 78812 - DNA, 80 bp, synthetic construct; identical to SEQ ID NO: 15168
  source 1..80: mol_type = other DNA

SEQ ID NO: 78813 - DNA, 80 bp, synthetic construct; identical to SEQ ID NO: 45211
  source 1..80: mol_type = other DNA

SEQ ID NO: 78814 - DNA, 80 bp, synthetic construct; identical to SEQ ID NO: 45212
  source 1..80: mol_type = other DNA

SEQ ID NO: 78815 - DNA, 80 bp, synthetic construct; identical to SEQ ID NO: 45213
  source 1..80: mol_type = other DNA

SEQ ID NO: 78816 - DNA, 80 bp, synthetic construct; identical to SEQ ID NO: 45214
  source 1..80: mol_type = other DNA

SEQ ID NO: 78817 - DNA, 80 bp, synthetic construct; identical to SEQ ID NO: 45215
  source 1..80: mol_type = other DNA

SEQ ID NO: 78818 - DNA, 80 bp, synthetic construct; identical to SEQ ID NO: 45216
  source 1..80: mol_type = other DNA

SEQ ID NO: 78819 - DNA, 80 bp, synthetic construct; identical to SEQ ID NO: 45217
  source 1..80: mol_type = other DNA

SEQ ID NO: 78820 - DNA, 80 bp, synthetic construct; identical to SEQ ID NO: 15170
  source 1..80: mol_type = other DNA

SEQ ID NO: 78821 - DNA, 80 bp, synthetic construct; identical to SEQ ID NO: 45219
  source 1..80: mol_type = other DNA

SEQ ID NO: 78822 - DNA, 80 bp, synthetic construct; identical to SEQ ID NO: 45220
  source 1..80: mol_type = other DNA

SEQ ID NO: 78823 - DNA, 80 bp, synthetic construct; identical to SEQ ID NO: 45221
  source 1..80: mol_type = other DNA

SEQ ID NO: 78824 - DNA, 80 bp, synthetic construct; identical to SEQ ID NO: 15171
  source 1..80: mol_type = other DNA

SEQ ID NO: 78825 - DNA, 80 bp, synthetic construct; identical to SEQ ID NO: 45223
  source 1..80: mol_type = other DNA

SEQ ID NO: 78826 - DNA, 80 bp, synthetic construct; identical to SEQ ID NO: 45224
  source 1..80: mol_type = other DNA

SEQ ID NO: 78827 - DNA, 80 bp, synthetic construct; identical to SEQ ID NO: 45225
  source 1..80: mol_type = other DNA

SEQ ID NO: 78828 - DNA, 80 bp, synthetic construct; identical to SEQ ID NO: 15172
  source 1..80: mol_type = other DNA

SEQ ID NO: 78829 - DNA, 80 bp, synthetic construct; identical to SEQ ID NO: 45227
  source 1..80: mol_type = other DNA

SEQ ID NO: 78830 - DNA, 80 bp, synthetic construct; identical to SEQ ID NO: 45228
  source 1..80: mol_type = other DNA

SEQ ID NO: 78831 - DNA, 80 bp, synthetic construct; identical to SEQ ID NO: 45229
  source 1..80: mol_type = other DNA

SEQ ID NO: 78832 - DNA, 80 bp, synthetic construct; identical to SEQ ID NO: 45230
  source 1..80: mol_type = other DNA

SEQ ID NO: 78833 - DNA, 80 bp, synthetic construct; identical to SEQ ID NO: 15173
  source 1..80: mol_type = other DNA

SEQ ID NO: 78834 - DNA, 80 bp, synthetic construct; identical to SEQ ID NO: 45234
  source 1..80: mol_type = other DNA

SEQ ID NO: 78835 - DNA, 80 bp, synthetic construct; identical to SEQ ID NO: 15174
  source 1..80: mol_type = other DNA

SEQ ID NO: 78836 - DNA, 80 bp, synthetic construct; identical to SEQ ID NO: 45237
  source 1..80: mol_type = other DNA

SEQ ID NO: 78837 - DNA, 80 bp, synthetic construct; identical to SEQ ID NO: 45238
  source 1..80: mol_type = other DNA

SEQ ID NO: 78838 - DNA, 80 bp, synthetic construct; identical to SEQ ID NO: 15175
  source 1..80: mol_type = other DNA

SEQ ID NO: 78839 - DNA, 80 bp, synthetic construct; identical to SEQ ID NO: 45240
  source 1..80: mol_type = other DNA

SEQ ID NO: 78840 - DNA, 80 bp, synthetic construct; identical to SEQ ID NO: 45241
  source 1..80: mol_type = other DNA

SEQ ID NO: 78841 - DNA, 80 bp, synthetic construct; identical to SEQ ID NO: 45242
  source 1..80: mol_type = other DNA

SEQ ID NO: 78842 - DNA, 80 bp, synthetic construct; identical to SEQ ID NO: 15176
  source 1..80: mol_type = other DNA

SEQ ID NO: 78843 - DNA, 80 bp, synthetic construct; identical to SEQ ID NO: 45244
  source 1..80: mol_type = other DNA

SEQ ID NO: 78844 - DNA, 80 bp, synthetic construct; identical to SEQ ID NO: 45245
  source 1..80: mol_type = other DNA

SEQ ID NO: 78845 - DNA, 80 bp, synthetic construct; identical to SEQ ID NO: 45246
  source 1..80: mol_type = other DNA

SEQ ID NO: 78846 - DNA, 80 bp, synthetic construct; identical to SEQ ID NO: 15177
  source 1..80: mol_type = other DNA

SEQ ID NO: 78847 - DNA, 80 bp, synthetic construct; identical to SEQ ID NO: 45248
  source 1..80: mol_type = other DNA

SEQ ID NO: 78848 - DNA, 80 bp, synthetic construct; identical to SEQ ID NO: 45249
  source 1..80: mol_type = other DNA

SEQ ID NO: 78849 - DNA, 80 bp, synthetic construct; identical to SEQ ID NO: 45250
  source 1..80: mol_type = other DNA

SEQ ID NO: 78850 - DNA, 80 bp, synthetic construct; identical to SEQ ID NO: 45251
  source 1..80: mol_type = other DNA

SEQ ID NO: 78851 - DNA, 80 bp, synthetic construct; identical to SEQ ID NO: 15178
  source 1..80: mol_type = other DNA

SEQ ID NO: 78852 - DNA, 80 bp, synthetic construct; identical to SEQ ID NO: 45253
  source 1..80: mol_type = other DNA

SEQ ID NO: 78853 - DNA, 80 bp, synthetic construct; identical to SEQ ID NO: 45254
  source 1..80: mol_type = other DNA

SEQ ID NO: 78854 - DNA, 80 bp, synthetic construct; identical to SEQ ID NO: 45255
  source 1..80: mol_type = other DNA

SEQ ID NO: 78855 - DNA, 80 bp, synthetic construct; identical to SEQ ID NO: 15179
  source 1..80: mol_type = other DNA

SEQ ID NO: 78856 - DNA, 80 bp, synthetic construct; identical to SEQ ID NO: 45258
  source 1..80: mol_type = other DNA

SEQ ID NO: 78857 - DNA, 80 bp, synthetic construct; identical to SEQ ID NO: 15180
  source 1..80: mol_type = other DNA

SEQ ID NO: 78858 - DNA, 80 bp, synthetic construct; identical to SEQ ID NO: 45260
  source 1..80: mol_type = other DNA

SEQ ID NO: 78859 - DNA, 80 bp, synthetic construct; identical to SEQ ID NO: 45262
  source 1..80: mol_type = other DNA

SEQ ID NO: 78860 - DNA, 80 bp, synthetic construct; identical to SEQ ID NO: 15181
  source 1..80: mol_type = other DNA

SEQ ID NO: 78861 - DNA, 80 bp, synthetic construct; identical to SEQ ID NO: 45264
  source 1..80: mol_type = other DNA

SEQ ID NO: 78862 - DNA, 80 bp, synthetic construct; identical to SEQ ID NO: 45265
  source 1..80: mol_type = other DNA

SEQ ID NO: 78863 - DNA, 80 bp, synthetic construct; identical to SEQ ID NO: 15182
  source 1..80: mol_type = other DNA

SEQ ID NO: 78864 - DNA, 80 bp, synthetic construct; identical to SEQ ID NO: 45268
  source 1..80: mol_type = other DNA

SEQ ID NO: 78865 - DNA, 80 bp, synthetic construct; identical to SEQ ID NO: 45269
  source 1..80: mol_type = other DNA

SEQ ID NO: 78866 - DNA, 80 bp, synthetic construct; identical to SEQ ID NO: 45270
  source 1..80: mol_type = other DNA

SEQ ID NO: 78867 - DNA, 80 bp, synthetic construct; identical to SEQ ID NO: 15183
  source 1..80: mol_type = other DNA

SEQ ID NO: 78868 - DNA, 80 bp, synthetic construct; identical to SEQ ID NO: 45272
  source 1..80: mol_type = other DNA

SEQ ID NO: 78869 - DNA, 80 bp, synthetic construct; identical to SEQ ID NO: 45273
  source 1..80: mol_type = other DNA

SEQ ID NO: 78870 - DNA, 80 bp, synthetic construct; identical to SEQ ID NO: 45274
  source 1..80: mol_type = other DNA

SEQ ID NO: 78871 - DNA, 80 bp, synthetic construct; identical to SEQ ID NO: 15184
  source 1..80: mol_type = other DNA

SEQ ID NO: 78872 - DNA, 80 bp, synthetic construct; identical to SEQ ID NO: 45276
  source 1..80: mol_type = other DNA

SEQ ID NO: 78873 - DNA, 80 bp, synthetic construct; identical to SEQ ID NO: 45277
  source 1..80: mol_type = other DNA

SEQ ID NO: 78874 - DNA, 80 bp, synthetic construct; identical to SEQ ID NO: 45278
  source 1..80: mol_type = other DNA

SEQ ID NO: 78875 - DNA, 80 bp, synthetic construct; identical to SEQ ID NO: 45279
  source 1..80: mol_type = other DNA

SEQ ID NO: 78876 - DNA, 80 bp, synthetic construct; identical to SEQ ID NO: 15185
  source 1..80: mol_type = other DNA

SEQ ID NO: 78877 - DNA, 80 bp, synthetic construct; identical to SEQ ID NO: 45281
  source 1..80: mol_type = other DNA

SEQ ID NO: 78878 - DNA, 80 bp, synthetic construct; identical to SEQ ID NO: 45282
  source 1..80: mol_type = other DNA

SEQ ID NO: 78879 - DNA, 80 bp, synthetic construct; identical to SEQ ID NO: 15186
  source 1..80: mol_type = other DNA

SEQ ID NO: 78880 - DNA, 80 bp, synthetic construct; identical to SEQ ID NO: 45284
  source 1..80: mol_type = other DNA

SEQ ID NO: 78881 - DNA, 80 bp, synthetic construct; identical to SEQ ID NO: 45285
  source 1..80: mol_type = other DNA

SEQ ID NO: 78882 - DNA, 80 bp, synthetic construct; identical to SEQ ID NO: 45286
  source 1..80: mol_type = other DNA

SEQ ID NO: 78883 - DNA, 80 bp, synthetic construct; identical to SEQ ID NO: 15187
  source 1..80: mol_type = other DNA

SEQ ID NO: 78884 - DNA, 80 bp, synthetic construct; identical to SEQ ID NO: 45288
  source 1..80: mol_type = other DNA

SEQ ID NO: 78885 - DNA, 80 bp, synthetic construct; identical to SEQ ID NO: 45289
  source 1..80: mol_type = other DNA

SEQ ID NO: 78886 - DNA, 80 bp, synthetic construct; identical to SEQ ID NO: 45290
  source 1..80: mol_type = other DNA

SEQ ID NO: 78887 - DNA, 80 bp, synthetic construct; identical to SEQ ID NO: 45291
  source 1..80: mol_type = other DNA

SEQ ID NO: 78888 - DNA, 80 bp, synthetic construct; identical to SEQ ID NO: 15188
  source 1..80: mol_type = other DNA

SEQ ID NO: 78889 - DNA, 80 bp, synthetic construct; identical to SEQ ID NO: 45293
  source 1..80: mol_type = other DNA

SEQ ID NO: 78890 - DNA, 80 bp, synthetic construct; identical to SEQ ID NO: 45294
  source 1..80: mol_type = other DNA

SEQ ID NO: 78891 - DNA, 80 bp, synthetic construct; identical to SEQ ID NO: 15189
  source 1..80: mol_type = other DNA

SEQ ID NO: 78892 - DNA, 80 bp, synthetic construct; identical to SEQ ID NO: 45296
  source 1..80: mol_type = other DNA

SEQ ID NO: 78893 - DNA, 80 bp, synthetic construct; identical to SEQ ID NO: 15201
  source 1..80: mol_type = other DNA

SEQ ID NO: 78894 - DNA, 80 bp, synthetic construct; identical to SEQ ID NO: 45298
  source 1..80: mol_type = other DNA

SEQ ID NO: 78895 - DNA, 80 bp, synthetic construct; identical to SEQ ID NO: 45299
  source 1..80: mol_type = other DNA

SEQ ID NO: 78896 - DNA, 80 bp, synthetic construct; identical to SEQ ID NO: 15190
  source 1..80: mol_type = other DNA

SEQ ID NO: 78897 - DNA, 80 bp, synthetic construct; identical to SEQ ID NO: 45301
  source 1..80: mol_type = other DNA

SEQ ID NO: 78898 - DNA, 80 bp, synthetic construct; identical to SEQ ID NO: 45302
  source 1..80: mol_type = other DNA

SEQ ID NO: 78899 - DNA, 80 bp, synthetic construct; identical to SEQ ID NO: 15191
  source 1..80: mol_type = other DNA

SEQ ID NO: 78900 - DNA, 80 bp, synthetic construct; identical to SEQ ID NO: 45304
  source 1..80: mol_type = other DNA

SEQ ID NO: 78901 - DNA, 80 bp, synthetic construct; identical to SEQ ID NO: 15192
  source 1..80: mol_type = other DNA

SEQ ID NO: 78902 - DNA, 80 bp, synthetic construct; identical to SEQ ID NO: 45306
  source 1..80: mol_type = other DNA

SEQ ID NO: 78903 - DNA, 80 bp, synthetic construct; identical to SEQ ID NO: 45307
  source 1..80: mol_type = other DNA

SEQ ID NO: 78904 - DNA, 80 bp, synthetic construct; identical to SEQ ID NO: 45308
  source 1..80: mol_type = other DNA

SEQ ID NO: 78905 - DNA, 80 bp, synthetic construct; identical to SEQ ID NO: 45309
  source 1..80: mol_type = other DNA

SEQ ID NO: 78906 - DNA, 80 bp, synthetic construct; identical to SEQ ID NO: 15193
  source 1..80: mol_type = other DNA

SEQ ID NO: 78907 - DNA, 80 bp, synthetic construct; identical to SEQ ID NO: 45311
  source 1..80: mol_type = other DNA

SEQ ID NO: 78908 - DNA, 80 bp, synthetic construct; identical to SEQ ID NO: 45312
  source 1..80: mol_type = other DNA

SEQ ID NO: 78909 - DNA, 80 bp, synthetic construct; identical to SEQ ID NO: 45313
  source 1..80: mol_type = other DNA

SEQ ID NO: 78910 - DNA, 80 bp, synthetic construct; identical to SEQ ID NO: 45314
  source 1..80: mol_type = other DNA

SEQ ID NO: 78911 - DNA, 80 bp, synthetic construct; identical to SEQ ID NO: 15194
  source 1..80: mol_type = other DNA

SEQ ID NO: 78912 - DNA, 80 bp, synthetic construct; identical to SEQ ID NO: 45316
  source 1..80: mol_type = other DNA

SEQ ID NO: 78913 - DNA, 80 bp, synthetic construct; identical to SEQ ID NO: 45318
  source 1..80: mol_type = other DNA

SEQ ID NO: 78914 - DNA, 80 bp, synthetic construct; identical to SEQ ID NO: 15195
  source 1..80: mol_type = other DNA

SEQ ID NO: 78915 - DNA, 80 bp, synthetic construct; identical to SEQ ID NO: 45320
  source 1..80: mol_type = other DNA

SEQ ID NO: 78916 - DNA, 80 bp, synthetic construct; identical to SEQ ID NO: 45321
  source 1..80: mol_type = other DNA

SEQ ID NO: 78917 - DNA, 80 bp, synthetic construct; identical to SEQ ID NO: 15196
  source 1..80: mol_type = other DNA

SEQ ID NO: 78918 - DNA, 80 bp, synthetic construct; identical to SEQ ID NO: 45323
  source 1..80: mol_type = other DNA

SEQ ID NO: 78919 - DNA, 80 bp, synthetic construct; identical to SEQ ID NO: 45324
  source 1..80: mol_type = other DNA

SEQ ID NO: 78920 - DNA, 80 bp, synthetic construct; identical to SEQ ID NO: 45325
  source 1..80: mol_type = other DNA

SEQ ID NO: 78921 - DNA, 80 bp, synthetic construct; identical to SEQ ID NO: 45326
  source 1..80: mol_type = other DNA

SEQ ID NO: 78922 - DNA, 80 bp, synthetic construct; identical to SEQ ID NO: 15197
  source 1..80: mol_type = other DNA

SEQ ID NO: 78923 - DNA, 80 bp, synthetic construct; identical to SEQ ID NO: 45328
  source 1..80: mol_type = other DNA

SEQ ID NO: 78924 - DNA, 80 bp, synthetic construct; identical to SEQ ID NO: 45329
  source 1..80: mol_type = other DNA

SEQ ID NO: 78925 - DNA, 80 bp, synthetic construct; identical to SEQ ID NO: 15198
  source 1..80: mol_type = other DNA

SEQ ID NO: 78926 - DNA, 80 bp, synthetic construct; identical to SEQ ID NO: 45331
  source 1..80: mol_type = other DNA

SEQ ID NO: 78927 - DNA, 80 bp, synthetic construct; identical to SEQ ID NO: 45332
  source 1..80: mol_type = other DNA

SEQ ID NO: 78928 - DNA, 80 bp, synthetic construct; identical to SEQ ID NO: 45333
  source 1..80: mol_type = other DNA

SEQ ID NO: 78929 - DNA, 80 bp, synthetic construct; identical to SEQ ID NO: 45334
  source 1..80: mol_type = other DNA

SEQ ID NO: 78930 - DNA, 80 bp, synthetic construct; identical to SEQ ID NO: 15199
  source 1..80: mol_type = other DNA

SEQ ID NO: 78931 - DNA, 80 bp, synthetic construct; identical to SEQ ID NO: 45336
  source 1..80: mol_type = other DNA

SEQ ID NO: 78932 - DNA, 80 bp, synthetic construct; identical to SEQ ID NO: 45337
  source 1..80: mol_type = other DNA

SEQ ID NO: 78933 - DNA, 80 bp, synthetic construct; identical to SEQ ID NO: 45338
  source 1..80: mol_type = other DNA

SEQ ID NO: 78934 - DNA, 80 bp, synthetic construct; identical to SEQ ID NO: 15200
  source 1..80: mol_type = other DNA

SEQ ID NO: 78935 - DNA, 80 bp, synthetic construct; identical to SEQ ID NO: 45340
  source 1..80: mol_type = other DNA

SEQ ID NO: 78936 - DNA, 80 bp, synthetic construct; identical to SEQ ID NO: 45341
  source 1..80: mol_type = other DNA

SEQ ID NO: 78937 - DNA, 80 bp, synthetic construct; identical to SEQ ID NO: 45342
  source 1..80: mol_type = other DNA

SEQ ID NO: 78938 - DNA, 80 bp, synthetic construct; identical to SEQ ID NO: 45343
  source 1..80: mol_type = other DNA

SEQ ID NO: 78939 - DNA, 80 bp, synthetic construct; identical to SEQ ID NO: 45344
  source 1..80: mol_type = other DNA

SEQ ID NO: 78940 - DNA, 80 bp, synthetic construct; identical to SEQ ID NO: 45345
  source 1..80: mol_type = other DNA

SEQ ID NO: 78941 - DNA, 80 bp, synthetic construct; identical to SEQ ID NO: 15202
  source 1..80: mol_type = other DNA

SEQ ID NO: 78942 - DNA, 80 bp, synthetic construct; identical to SEQ ID NO: 45347
  source 1..80: mol_type = other DNA

SEQ ID NO: 78943 - DNA, 80 bp, synthetic construct; identical to SEQ ID NO: 45348
  source 1..80: mol_type = other DNA

SEQ ID NO: 78944 - DNA, 80 bp, synthetic construct; identical to SEQ ID NO: 15203
  source 1..80: mol_type = other DNA

SEQ ID NO: 78945 - DNA, 80 bp, synthetic construct; identical to SEQ ID NO: 45350
  source 1..80: mol_type = other DNA

SEQ ID NO: 78946 - DNA, 80 bp, synthetic construct; identical to SEQ ID NO: 45351
  source 1..80: mol_type = other DNA

SEQ ID NO: 78947 - DNA, 80 bp, synthetic construct; identical to SEQ ID NO: 45352
  source 1..80: mol_type = other DNA

SEQ ID NO: 78948 - DNA, 80 bp, synthetic construct; identical to SEQ ID NO: 15204
  source 1..80: mol_type = other DNA

SEQ ID NO: 78949 - DNA, 80 bp, synthetic construct; identical to SEQ ID NO: 45355
  source 1..80: mol_type = other DNA

SEQ ID NO: 78950 - DNA, 80 bp, synthetic construct; identical to SEQ ID NO: 15205
  source 1..80: mol_type = other DNA

SEQ ID NO: 78951 - DNA, 80 bp, synthetic construct; identical to SEQ ID NO: 45358
  source 1..80: mol_type = other DNA

SEQ ID NO: 78952 - DNA, 80 bp, synthetic construct; identical to SEQ ID NO: 45359
  source 1..80: mol_type = other DNA

SEQ ID NO: 78953 - DNA, 80 bp, synthetic construct; identical to SEQ ID NO: 45360
  source 1..80: mol_type = other DNA

SEQ ID NO: 78954 - DNA, 80 bp, synthetic construct; identical to SEQ ID NO: 15206
  source 1..80: mol_type = other DNA

SEQ ID NO: 78955 - DNA, 80 bp, synthetic construct; identical to SEQ ID NO: 45363
  source 1..80: mol_type = other DNA

SEQ ID NO: 78956 - DNA, 80 bp, synthetic construct; identical to SEQ ID NO: 45364
  source 1..80: mol_type = other DNA

SEQ ID NO: 78957 - DNA, 80 bp, synthetic construct; identical to SEQ ID NO: 15207
  source 1..80: mol_type = other DNA

SEQ ID NO: 78958 - DNA, 80 bp, synthetic construct; identical to SEQ ID NO: 45366
  source 1..80: mol_type = other DNA

SEQ ID NO: 78959 - DNA, 80 bp, synthetic construct; identical to SEQ ID NO: 45367
  source 1..80: mol_type = other DNA

SEQ ID NO: 78960 - DNA, 80 bp, synthetic construct; identical to SEQ ID NO: 15208
  source 1..80: mol_type = other DNA

SEQ ID NO: 78961 - DNA, 80 bp, synthetic construct; identical to SEQ ID NO: 45370
  source 1..80: mol_type = other DNA

SEQ ID NO: 78962 - DNA, 80 bp, synthetic construct; identical to SEQ ID NO: 45371
  source 1..80: mol_type = other DNA

SEQ ID NO: 78963 - DNA, 80 bp, synthetic construct; identical to SEQ ID NO: 45372
  source 1..80: mol_type = other DNA

SEQ ID NO: 78964 - DNA, 80 bp, synthetic construct; identical to SEQ ID NO: 45373
  source 1..80: mol_type = other DNA

SEQ ID NO: 78965 - DNA, 80 bp, synthetic construct; identical to SEQ ID NO: 15209
  source 1..80: mol_type = other DNA

SEQ ID NO: 78966 - DNA, 80 bp, synthetic construct; identical to SEQ ID NO: 45375
  source 1..80: mol_type = other DNA

SEQ ID NO: 78967 - DNA, 80 bp, synthetic construct; identical to SEQ ID NO: 45376
  source 1..80: mol_type = other DNA

SEQ ID NO: 78968 - DNA, 80 bp, synthetic construct; identical to SEQ ID NO: 15210
  source 1..80: mol_type = other DNA

SEQ ID NO: 78969 - DNA, 80 bp, synthetic construct; identical to SEQ ID NO: 45379
  source 1..80: mol_type = other DNA

SEQ ID NO: 78970 - DNA, 80 bp, synthetic construct; identical to SEQ ID NO: 45381
  source 1..80: mol_type = other DNA

SEQ ID NO: 78971 - DNA, 80 bp, synthetic construct; identical to SEQ ID NO: 15211
  source 1..80: mol_type = other DNA

SEQ ID NO: 78972 - DNA, 80 bp, synthetic construct; identical to SEQ ID NO: 45383
  source 1..80: mol_type = other DNA

SEQ ID NO: 78973 - DNA, 80 bp, synthetic construct; identical to SEQ ID NO: 45384
  source 1..80: mol_type = other DNA

SEQ ID NO: 78974 - DNA, 80 bp, synthetic construct; identical to SEQ ID NO: 15212
  source 1..80: mol_type = other DNA

SEQ ID NO: 78975 - DNA, 80 bp, synthetic construct; identical to SEQ ID NO: 45386
  source 1..80: mol_type = other DNA

SEQ ID NO: 78976 - DNA, 80 bp, synthetic construct; identical to SEQ ID NO: 45388
  source 1..80: mol_type = other DNA

SEQ ID NO: 78977 - DNA, 80 bp, synthetic construct; identical to SEQ ID NO: 15213
  source 1..80: mol_type = other DNA

SEQ ID NO: 78978 - DNA, 80 bp, synthetic construct; identical to SEQ ID NO: 45390
  source 1..80: mol_type = other DNA

SEQ ID NO: 78979 - DNA, 80 bp, synthetic construct; identical to SEQ ID NO: 45391
  source 1..80: mol_type = other DNA

SEQ ID NO: 78980 - DNA, 80 bp, synthetic construct; identical to SEQ ID NO: 45392
  source 1..80: mol_type = other DNA

SEQ ID NO: 78981 - DNA, 80 bp, synthetic construct; identical to SEQ ID NO: 15214
  source 1..80: mol_type = other DNA

SEQ ID NO: 78982 - DNA, 80 bp, synthetic construct; identical to SEQ ID NO: 45395
  source 1..80: mol_type = other DNA

SEQ ID NO: 78983 - DNA, 80 bp, synthetic construct; identical to SEQ ID NO: 45396
  source 1..80: mol_type = other DNA

SEQ ID NO: 78984 - DNA, 80 bp, synthetic construct; identical to SEQ ID NO: 45397
  source 1..80: mol_type = other DNA

SEQ ID NO: 78985 - DNA, 80 bp, synthetic construct; identical to SEQ ID NO: 15215
  source 1..80: mol_type = other DNA

SEQ ID NO: 78986 - DNA, 80 bp, synthetic construct; identical to SEQ ID NO: 45400
  source 1..80: mol_type = other DNA

SEQ ID NO: 78987 - DNA, 80 bp, synthetic construct; identical to SEQ ID NO: 45401
  source 1..80: mol_type = other DNA

SEQ ID NO: 78988 - DNA, 80 bp, synthetic construct; identical to SEQ ID NO: 15216
  source 1..80: mol_type = other DNA

SEQ ID NO: 78989 - DNA, 80 bp, synthetic construct; identical to SEQ ID NO: 45404
  source 1..80: mol_type = other DNA

SEQ ID NO: 78990 - DNA, 80 bp, synthetic construct; identical to SEQ ID NO: 45405
  source 1..80: mol_type = other DNA

SEQ ID NO: 78991 - DNA, 80 bp, synthetic construct; identical to SEQ ID NO: 15217
  source 1..80: mol_type = other DNA

SEQ ID NO: 78992 - DNA, 80 bp, synthetic construct; identical to SEQ ID NO: 45408
  source 1..80: mol_type = other DNA

SEQ ID NO: 78993 - DNA, 80 bp, synthetic construct; identical to SEQ ID NO: 45409
  source 1..80: mol_type = other DNA

SEQ ID NO: 78994 - DNA, 80 bp, synthetic construct; identical to SEQ ID NO: 45410
  source 1..80: mol_type = other DNA

SEQ ID NO: 78995 - DNA, 80 bp, synthetic construct; identical to SEQ ID NO: 45411
  source 1..80: mol_type = other DNA

SEQ ID NO: 78996 - DNA, 80 bp, synthetic construct; identical to SEQ ID NO: 15218
  source 1..80: mol_type = other DNA

SEQ ID NO: 78997 - DNA, 80 bp, synthetic construct; identical to SEQ ID NO: 45414
  source 1..80: mol_type = other DNA

SEQ ID NO: 78998 - DNA, 80 bp, synthetic construct; identical to SEQ ID NO: 15219
  source 1..80: mol_type = other DNA

SEQ ID NO: 78999 - DNA, 80 bp, synthetic construct; identical to SEQ ID NO: 45416
  source 1..80: mol_type = other DNA

SEQ ID NO: 79000 - DNA, 80 bp, synthetic construct; identical to SEQ ID NO: 45418
  source 1..80: mol_type = other DNA

SEQ ID NO: 79001 - DNA, 80 bp, synthetic construct; identical to SEQ ID NO: 15220
  source 1..80: mol_type = other DNA

SEQ ID NO: 79002 - DNA, 80 bp, synthetic construct; identical to SEQ ID NO: 45422
  source 1..80: mol_type = other DNA

SEQ ID NO: 79003 - DNA, 80 bp, synthetic construct; identical to SEQ ID NO: 45423
  source 1..80: mol_type = other DNA

SEQ ID NO: 79004 - DNA, 80 bp, synthetic construct; identical to SEQ ID NO: 15221
  source 1..80: mol_type = other DNA

SEQ ID NO: 79005 - DNA, 80 bp, synthetic construct; identical to SEQ ID NO: 45425
  source 1..80: mol_type = other DNA

SEQ ID NO: 79006 - DNA, 80 bp, synthetic construct; identical to SEQ ID NO: 45426
  source 1..80: mol_type = other DNA

SEQ ID NO: 79007 - DNA, 80 bp, synthetic construct; identical to SEQ ID NO: 45427
  source 1..80: mol_type = other DNA

SEQ ID NO: 79008 - DNA, 80 bp, synthetic construct; identical to SEQ ID NO: 15222
  source 1..80: mol_type = other DNA

SEQ ID NO: 79009 - DNA, 80 bp, synthetic construct; identical to SEQ ID NO: 45430
  source 1..80: mol_type = other DNA

SEQ ID NO: 79010 - DNA, 80 bp, synthetic construct; identical to SEQ ID NO: 45431
  source 1..80: mol_type = other DNA

SEQ ID NO: 79011 - DNA, 80 bp, synthetic construct; identical to SEQ ID NO: 15223
  source 1..80: mol_type = other DNA

SEQ ID NO: 79012 - DNA, 80 bp, synthetic construct; identical to SEQ ID NO: 45433
  source 1..80: mol_type = other DNA

SEQ ID NO: 79013 - DNA, 80 bp, synthetic construct; identical to SEQ ID NO: 15224
  source 1..80: mol_type = other DNA

SEQ ID NO: 79014 - DNA, 80 bp, synthetic construct; identical to SEQ ID NO: 45435
  source 1..80: mol_type = other DNA

SEQ ID NO: 79015 - DNA, 80 bp, synthetic construct; identical to SEQ ID NO: 45436
  source 1..80: mol_type = other DNA

SEQ ID NO: 79016 - DNA, 80 bp, synthetic construct; identical to SEQ ID NO: 45437
  source 1..80: mol_type = other DNA

SEQ ID NO: 79017 - DNA, 80 bp, synthetic construct; identical to SEQ ID NO: 45438
  source 1..80: mol_type = other DNA

SEQ ID NO: 79018 - DNA, 80 bp, synthetic construct; identical to SEQ ID NO: 15225
  source 1..80: mol_type = other DNA

SEQ ID NO: 79019 - DNA, 80 bp, synthetic construct; identical to SEQ ID NO: 45440
  source 1..80: mol_type = other DNA

SEQ ID NO: 79020 - DNA, 80 bp, synthetic construct; identical to SEQ ID NO: 45441
  source 1..80: mol_type = other DNA

SEQ ID NO: 79021 - DNA, 80 bp, synthetic construct; identical to SEQ ID NO: 15226
  source 1..80: mol_type = other DNA

SEQ ID NO: 79022 - DNA, 80 bp, synthetic construct; identical to SEQ ID NO: 45443
  source 1..80: mol_type = other DNA

SEQ ID NO: 79023 - DNA, 80 bp, synthetic construct; identical to SEQ ID NO: 45444
  source 1..80: mol_type = other DNA

SEQ ID NO: 79024 - DNA, 80 bp, synthetic construct; identical to SEQ ID NO: 45445
  source 1..80: mol_type = other DNA

SEQ ID NO: 79025 - DNA, 80 bp, synthetic construct; identical to SEQ ID NO: 15227
  source 1..80: mol_type = other DNA

SEQ ID NO: 79026 - DNA, 80 bp, synthetic construct; identical to SEQ ID NO: 45447
  source 1..80: mol_type = other DNA

SEQ ID NO: 79027 - DNA, 80 bp, synthetic construct; identical to SEQ ID NO: 45448
  source 1..80: mol_type = other DNA

SEQ ID NO: 79028 - DNA, 80 bp, synthetic construct; identical to SEQ ID NO: 45449
  source 1..80: mol_type = other DNA

SEQ ID NO: 79029 - DNA, 80 bp, synthetic construct; identical to SEQ ID NO: 15228
  source 1..80: mol_type = other DNA

SEQ ID NO: 79030 - DNA, 80 bp, synthetic construct; identical to SEQ ID NO: 45451
  source 1..80: mol_type = other DNA

SEQ ID NO: 79031 - DNA, 80 bp, synthetic construct; identical to SEQ ID NO: 45452
  source 1..80: mol_type = other DNA

SEQ ID NO: 79032 - DNA, 80 bp, synthetic construct; identical to SEQ ID NO: 45453
  source 1..80: mol_type = other DNA

SEQ ID NO: 79033 - DNA, 80 bp, synthetic construct; identical to SEQ ID NO: 45454
  source 1..80: mol_type = other DNA

SEQ ID NO: 79034 - DNA, 80 bp, synthetic construct; identical to SEQ ID NO: 15229
  source 1..80: mol_type = other DNA

SEQ ID NO: 79035 - DNA, 80 bp, synthetic construct; identical to SEQ ID NO: 45456
  source 1..80: mol_type = other DNA

SEQ ID NO: 79036 - DNA, 80 bp, synthetic construct; identical to SEQ ID NO: 45457
  source 1..80: mol_type = other DNA

SEQ ID NO: 79037 - DNA, 80 bp, synthetic construct; identical to SEQ ID NO: 45458
  source 1..80: mol_type = other DNA

SEQ ID NO: 79038 - DNA, 80 bp, synthetic construct; identical to SEQ ID NO: 15230
  source 1..80: mol_type = other DNA

SEQ ID NO: 79039 - DNA, 80 bp, synthetic construct; identical to SEQ ID NO: 45460
  source 1..80: mol_type = other DNA

SEQ ID NO: 79040 - DNA, 80 bp, synthetic construct; identical to SEQ ID NO: 45461
  source 1..80: mol_type = other DNA

SEQ ID NO: 79041 - DNA, 80 bp, synthetic construct; identical to SEQ ID NO: 15231
  source 1..80: mol_type = other DNA

SEQ ID NO: 79042 - DNA, 80 bp, synthetic construct; identical to SEQ ID NO: 45464
  source 1..80: mol_type = other DNA

SEQ ID NO: 79043 - DNA, 80 bp, synthetic construct; identical to SEQ ID NO: 45465
  source 1..80: mol_type = other DNA

SEQ ID NO: 79044 - DNA, 80 bp, synthetic construct; identical to SEQ ID NO: 45466
  source 1..80: mol_type = other DNA

SEQ ID NO: 79045 - DNA, 80 bp, synthetic construct; identical to SEQ ID NO: 15232
  source 1..80: mol_type = other DNA

SEQ ID NO: 79046 - DNA, 80 bp, synthetic construct; identical to SEQ ID NO: 45468
  source 1..80: mol_type = other DNA

SEQ ID NO: 79047 - DNA, 80 bp, synthetic construct; identical to SEQ ID NO: 45469
  source 1..80: mol_type = other DNA

SEQ ID NO: 79048 - DNA, 80 bp, synthetic construct; identical to SEQ ID NO: 45470
  source 1..80: mol_type = other DNA

SEQ ID NO: 79049 - DNA, 80 bp, synthetic construct; identical to SEQ ID NO: 15233
  source 1..80: mol_type = other DNA

SEQ ID NO: 79050 - DNA, 80 bp, synthetic construct; identical to SEQ ID NO: 45472
  source 1..80: mol_type = other DNA

SEQ ID NO: 79051 - DNA, 80 bp, synthetic construct; identical to SEQ ID NO: 15234
  source 1..80: mol_type = other DNA

SEQ ID NO: 79052 - DNA, 80 bp, synthetic construct; identical to SEQ ID NO: 45475
  source 1..80: mol_type = other DNA

SEQ ID NO: 79053 - DNA, 80 bp, synthetic construct; identical to SEQ ID NO: 45476
  source 1..80: mol_type = other DNA

SEQ ID NO: 79054 - DNA, 80 bp, synthetic construct; identical to SEQ ID NO: 45477
  source 1..80: mol_type = other DNA

SEQ ID NO: 79055 - DNA, 80 bp, synthetic construct; identical to SEQ ID NO: 15235
  source 1..80: mol_type = other DNA

SEQ ID NO: 79056 - DNA, 80 bp, synthetic construct; identical to SEQ ID NO: 45479
  source 1..80: mol_type = other DNA

SEQ ID NO: 79057 - DNA, 80 bp, synthetic construct; identical to SEQ ID NO: 45480
  source 1..80: mol_type = other DNA

SEQ ID NO: 79058 - DNA, 80 bp, synthetic construct; identical to SEQ ID NO: 45481
  source 1..80: mol_type = other DNA

SEQ ID NO: 79059 - DNA, 80 bp, synthetic construct; identical to SEQ ID NO: 15236
  source 1..80: mol_type = other DNA

SEQ ID NO: 79060 - DNA, 80 bp, synthetic construct; identical to SEQ ID NO: 45483
  source 1..80: mol_type = other DNA

SEQ ID NO: 79061 - DNA, 80 bp, synthetic construct; identical to SEQ ID NO: 45484
  source 1..80: mol_type = other DNA

SEQ ID NO: 79062 - DNA, 80 bp, synthetic construct; identical to SEQ ID NO: 45485
  source 1..80: mol_type = other DNA

SEQ ID NO: 79063 - DNA, 80 bp, synthetic construct; identical to SEQ ID NO: 45486
  source 1..80: mol_type = other DNA

SEQ ID NO: 79064 - DNA, 80 bp, synthetic construct; identical to SEQ ID NO: 15237
  source 1..80: mol_type = other DNA

SEQ ID NO: 79065 - DNA, 80 bp, synthetic construct; identical to SEQ ID NO: 45488
  source 1..80: mol_type = other DNA

SEQ ID NO: 79066 - DNA, 80 bp, synthetic construct; identical to SEQ ID NO: 45489
  source 1..80: mol_type = other DNA

SEQ ID NO: 79067 - DNA, 80 bp, synthetic construct; identical to SEQ ID NO: 15238
  source 1..80: mol_type = other DNA

SEQ ID NO: 79068 - DNA, 80 bp, synthetic construct; identical to SEQ ID NO: 45491
  source 1..80: mol_type = other DNA

SEQ ID NO: 79069 - DNA, 80 bp, synthetic construct; identical to SEQ ID NO: 45492
  source 1..80: mol_type = other DNA

SEQ ID NO: 79070 - DNA, 80 bp, synthetic construct; identical to SEQ ID NO: 45493
  source 1..80: mol_type = other DNA

SEQ ID NO: 79071 - DNA, 80 bp, synthetic construct; identical to SEQ ID NO: 15239
  source 1..80: mol_type = other DNA

SEQ ID NO: 79072 - DNA, 80 bp, synthetic construct; identical to SEQ ID NO: 45495
  source 1..80: mol_type = other DNA

SEQ ID NO: 79073 - DNA, 80 bp, synthetic construct; identical to SEQ ID NO: 45496
  source 1..80: mol_type = other DNA

SEQ ID NO: 79074 - DNA, 80 bp, synthetic construct; identical to SEQ ID NO: 45497
  source 1..80: mol_type = other DNA

SEQ ID NO: 79075 - DNA, 80 bp, synthetic construct; identical to SEQ ID NO: 45498
  source 1..80: mol_type = other DNA

SEQ ID NO: 79076 - DNA, 80 bp, synthetic construct; identical to SEQ ID NO: 15240
  source 1..80: mol_type = other DNA

SEQ ID NO: 79077 - DNA, 80 bp, synthetic construct; identical to SEQ ID NO: 45500
  source 1..80: mol_type = other DNA

SEQ ID NO: 79078 - DNA, 80 bp, synthetic construct; identical to SEQ ID NO: 45501
  source 1..80: mol_type = other DNA

SEQ ID NO: 79079 - DNA, 80 bp, synthetic construct; identical to SEQ ID NO: 45502
  source 1..80: mol_type = other DNA

SEQ ID NO: 79080 - DNA, 80 bp, synthetic construct; identical to SEQ ID NO: 15241
  source 1..80: mol_type = other DNA

SEQ ID NO: 79081 - DNA, 80 bp, synthetic construct; identical to SEQ ID NO: 45504
  source 1..80: mol_type = other DNA

SEQ ID NO: 79082 - DNA, 80 bp, synthetic construct; identical to SEQ ID NO: 45505
  source 1..80: mol_type = other DNA

SEQ ID NO: 79083 - DNA, 80 bp, synthetic construct; identical to SEQ ID NO: 15242
  source 1..80: mol_type = other DNA

SEQ ID NO: 79084 - DNA, 80 bp, synthetic construct; identical to SEQ ID NO: 45507
  source 1..80: mol_type = other DNA

SEQ ID NO: 79085 - DNA, 80 bp, synthetic construct; identical to SEQ ID NO: 45508
  source 1..80: mol_type = other DNA

SEQ ID NO: 79086 - DNA, 80 bp, synthetic construct; identical to SEQ ID NO: 45509
  source 1..80: mol_type = other DNA

SEQ ID NO: 79087 - DNA, 80 bp, synthetic construct; identical to SEQ ID NO: 15243
  source 1..80: mol_type = other DNA

SEQ ID NO: 79088 - DNA, 80 bp, synthetic construct; identical to SEQ ID NO: 45511
  source 1..80: mol_type = other DNA

SEQ ID NO: 79089 - DNA, 80 bp, synthetic construct; identical to SEQ ID NO: 45512
  source 1..80: mol_type = other DNA

SEQ ID NO: 79090 - DNA, 80 bp, synthetic construct; identical to SEQ ID NO: 45513
  source 1..80: mol_type = other DNA

SEQ ID NO: 79091 - DNA, 80 bp, synthetic construct; identical to SEQ ID NO: 15244
  source 1..80: mol_type = other DNA

SEQ ID NO: 79092 - DNA, 80 bp, synthetic construct; identical to SEQ ID NO: 45515
  source 1..80: mol_type = other DNA

SEQ ID NO: 79093 - DNA, 80 bp, synthetic construct; identical to SEQ ID NO: 45516
  source 1..80: mol_type = other DNA

SEQ ID NO: 79094 - DNA, 80 bp, synthetic construct; identical to SEQ ID NO: 15245
  source 1..80: mol_type = other DNA

SEQ ID NO: 79095 - DNA, 80 bp, synthetic construct; identical to SEQ ID NO: 45519
  source 1..80: mol_type = other DNA

SEQ ID NO: 79096 - DNA, 80 bp, synthetic construct; identical to SEQ ID NO: 45520
  source 1..80: mol_type = other DNA

SEQ ID NO: 79097 - DNA, 80 bp, synthetic construct; identical to SEQ ID NO: 45521
  source 1..80: mol_type = other DNA

SEQ ID NO: 79098 - DNA, 80 bp, synthetic construct; identical to SEQ ID NO: 15246
  source 1..80: mol_type = other DNA

SEQ ID NO: 79099 - DNA, 80 bp, synthetic construct; identical to SEQ ID NO: 45523
  source 1..80: mol_type = other DNA

SEQ ID NO: 79100 - DNA, 80 bp, synthetic construct; identical to SEQ ID NO: 45524
  source 1..80: mol_type = other DNA

SEQ ID NO: 79101 - DNA, 80 bp, synthetic construct; identical to SEQ ID NO: 45525
  source 1..80: mol_type = other DNA

SEQ ID NO: 79102 - DNA, 80 bp, synthetic construct; identical to SEQ ID NO: 45526
  source 1..80: mol_type = other DNA

SEQ ID NO: 79103 - DNA, 80 bp, synthetic construct; identical to SEQ ID NO: 15247
  source 1..80: mol_type = other DNA

SEQ ID NO: 79104 - DNA, 80 bp, synthetic construct; identical to SEQ ID NO: 45528
  source 1..80: mol_type = other DNA

SEQ ID NO: 79105 - DNA, 80 bp, synthetic construct; identical to SEQ ID NO: 45529
  source 1..80: mol_type = other DNA

SEQ ID NO: 79106 - DNA, 80 bp, synthetic construct; identical to SEQ ID NO: 15248
  source 1..80: mol_type = other DNA

SEQ ID NO: 79107 - DNA, 80 bp, synthetic construct; identical to SEQ ID NO: 45531
  source 1..80: mol_type = other DNA

SEQ ID NO: 79108 - DNA, 80 bp, synthetic construct; identical to SEQ ID NO: 45532
  source 1..80: mol_type = other DNA

SEQ ID NO: 79109 - DNA, 80 bp, synthetic construct; identical to SEQ ID NO: 45533
  source 1..80: mol_type = other DNA

SEQ ID NO: 79110 - DNA, 80 bp, synthetic construct; identical to SEQ ID NO: 15249
  source 1..80: mol_type = other DNA

SEQ ID NO: 79111 - DNA, 80 bp, synthetic construct; identical to SEQ ID NO: 45537
  source 1..80: mol_type = other DNA

SEQ ID NO: 79112 - DNA, 80 bp, synthetic construct; identical to SEQ ID NO: 15250
  source 1..80: mol_type = other DNA

SEQ ID NO: 79113 - DNA, 80 bp, synthetic construct; identical to SEQ ID NO: 45539
  source 1..80: mol_type = other DNA

SEQ ID NO: 79114 - DNA, 80 bp, synthetic construct; identical to SEQ ID NO: 45540
  source 1..80: mol_type = other DNA

SEQ ID NO: 79115 - DNA, 80 bp, synthetic construct; identical to SEQ ID NO: 45542
  source 1..80: mol_type = other DNA

SEQ ID NO: 79116 - DNA, 80 bp, synthetic construct; identical to SEQ ID NO: 15251
  source 1..80: mol_type = other DNA

SEQ ID NO: 79117 - DNA, 80 bp, synthetic construct; identical to SEQ ID NO: 45544
  source 1..80: mol_type = other DNA

SEQ ID NO: 79118 - DNA, 80 bp, synthetic construct; identical to SEQ ID NO: 45545
  source 1..80: mol_type = other DNA

SEQ ID NO: 79119 - DNA, 80 bp, synthetic construct; identical to SEQ ID NO: 45546
  source 1..80: mol_type = other DNA

SEQ ID NO: 79120 - DNA, 80 bp, synthetic construct; identical to SEQ ID NO: 15252
  source 1..80: mol_type = other DNA

SEQ ID NO: 79121 - DNA, 80 bp, synthetic construct; identical to SEQ ID NO: 45548
  source 1..80: mol_type = other DNA

SEQ ID NO: 79122 - DNA, 80 bp, synthetic construct; identical to SEQ ID NO: 45549
  source 1..80: mol_type = other DNA

SEQ ID NO: 79123 - DNA, 80 bp, synthetic construct; identical to SEQ ID NO: 15253
  source 1..80: mol_type = other DNA

SEQ ID NO: 79124 - DNA, 80 bp, synthetic construct; identical to SEQ ID NO: 45551
  source 1..80: mol_type = other DNA

SEQ ID NO: 79125 - DNA, 80 bp, synthetic construct; identical to SEQ ID NO: 45552
  source 1..80: mol_type = other DNA

SEQ ID NO: 79126 - DNA, 80 bp, synthetic construct; identical to SEQ ID NO: 45553
  source 1..80: mol_type = other DNA

SEQ ID NO: 79127 - DNA, 80 bp, synthetic construct; identical to SEQ ID NO: 15254
  source 1..80: mol_type = other DNA

SEQ ID NO: 79128 - DNA, 80 bp, synthetic construct; identical to SEQ ID NO: 45555
  source 1..80: mol_type = other DNA

SEQ ID NO: 79129 - DNA, 80 bp, synthetic construct; identical to SEQ ID NO: 45556
  source 1..80: mol_type = other DNA

SEQ ID NO: 79130 - DNA, 80 bp, synthetic construct; identical to SEQ ID NO: 45557
  source 1..80: mol_type = other DNA

SEQ ID NO: 79131 - DNA, 80 bp, synthetic construct; identical to SEQ ID NO: 45558
  source 1..80: mol_type = other DNA

SEQ ID NO: 79132 - DNA, 80 bp, synthetic construct; identical to SEQ ID NO: 15255
  source 1..80: mol_type = other DNA

SEQ ID NO: 79133 - DNA, 80 bp, synthetic construct; identical to SEQ ID NO: 45560
  source 1..80: mol_type = other DNA

SEQ ID NO: 79134 - DNA, 80 bp, synthetic construct; identical to SEQ ID NO: 45561
  source 1..80: mol_type = other DNA

SEQ ID NO: 79135 - DNA, 80 bp, synthetic construct; identical to SEQ ID NO: 15256
  source 1..80: mol_type = other DNA

SEQ ID NO: 79136 - DNA, 80 bp, synthetic construct; identical to SEQ ID NO: 45563
  source 1..80: mol_type = other DNA

SEQ ID NO: 79137 - DNA, 80 bp, synthetic construct; identical to SEQ ID NO: 45564
  source 1..80: mol_type = other DNA

SEQ ID NO: 79138 - DNA, 80 bp, synthetic construct; identical to SEQ ID NO: 45565
  source 1..80: mol_type = other DNA

SEQ ID NO: 79139 - DNA, 80 bp, synthetic construct; identical to SEQ ID NO: 45566
  source 1..80: mol_type = other DNA

SEQ ID NO: 79140 - DNA, 80 bp, synthetic construct; identical to SEQ ID NO: 15257
  source 1..80: mol_type = other DNA

SEQ ID NO: 79141 - DNA, 80 bp, synthetic construct; identical to SEQ ID NO: 45568
  source 1..80: mol_type = other DNA

SEQ ID NO: 79142 - DNA, 80 bp, synthetic construct; identical to SEQ ID NO: 45569
  source 1..80: mol_type = other DNA

SEQ ID NO: 79143 - DNA, 80 bp, synthetic construct; identical to SEQ ID NO: 45570
  source 1..80: mol_type = other DNA

SEQ ID NO: 79144 - DNA, 80 bp, synthetic construct; identical to SEQ ID NO: 15258
  source 1..80: mol_type = other DNA

SEQ ID NO: 79145 - DNA, 80 bp, synthetic construct; identical to SEQ ID NO: 45572
  source 1..80: mol_type = other DNA

SEQ ID NO: 79146 - DNA, 80 bp, synthetic construct; identical to SEQ ID NO: 45573
  source 1..80: mol_type = other DNA

SEQ ID NO: 79147 - DNA, 80 bp, synthetic construct; identical to SEQ ID NO: 15259
  source 1..80: mol_type = other DNA

SEQ ID NO: 79148 - DNA, 80 bp, synthetic construct; identical to SEQ ID NO: 45575
  source 1..80: mol_type = other DNA

SEQ ID NO: 79149 - DNA, 80 bp, synthetic construct; identical to SEQ ID NO: 45576
  source 1..80: mol_type = other DNA

SEQ ID NO: 79150 - DNA, 80 bp, synthetic construct; identical to SEQ ID NO: 45577
  source 1..80: mol_type = other DNA

SEQ ID NO: 79151 - DNA, 80 bp, synthetic construct; identical to SEQ ID NO: 15260
  source 1..80: mol_type = other DNA

SEQ ID NO: 79152 - DNA, 80 bp, synthetic construct; identical to SEQ ID NO: 45579
  source 1..80: mol_type = other DNA

SEQ ID NO: 79153 - DNA, 80 bp, synthetic construct; identical to SEQ ID NO: 45580
  source 1..80: mol_type = other DNA

SEQ ID NO: 79154 - DNA, 80 bp, synthetic construct; identical to SEQ ID NO: 45581
  source 1..80: mol_type = other DNA

SEQ ID NO: 79155 - DNA, 80 bp, synthetic construct; identical to SEQ ID NO: 45582
  source 1..80: mol_type = other DNA

SEQ ID NO: 79156 - DNA, 80 bp, synthetic construct; identical to SEQ ID NO: 15261
  source 1..80: mol_type = other DNA

SEQ ID NO: 79157 - DNA, 80 bp, synthetic construct; identical to SEQ ID NO: 45584
  source 1..80: mol_type = other DNA

SEQ ID NO: 79158 - DNA, 80 bp, synthetic construct; identical to SEQ ID NO: 45585
  source 1..80: mol_type = other DNA

SEQ ID NO: 79159 - DNA, 80 bp, synthetic construct; identical to SEQ ID NO: 45586
  source 1..80: mol_type = other DNA

SEQ ID NO: 79160 - DNA, 80 bp, synthetic construct; identical to SEQ ID NO: 15262
  source 1..80: mol_type = other DNA

SEQ ID NO: 79161 - DNA, 80 bp, synthetic construct; identical to SEQ ID NO: 45588
  source 1..80: mol_type = other DNA

SEQ ID NO: 79162 - DNA, 80 bp, synthetic construct; identical to SEQ ID NO: 45589
  source 1..80: mol_type = other DNA

SEQ ID NO: 79163 - DNA, 80 bp, synthetic construct; identical to SEQ ID NO: 15263
  source 1..80: mol_type = other DNA

SEQ ID NO: 79164 - DNA, 80 bp, synthetic construct; identical to SEQ ID NO: 45591
  source 1..80: mol_type = other DNA

SEQ ID NO: 79165 - DNA, 80 bp, synthetic construct; identical to SEQ ID NO: 45592
  source 1..80: mol_type = other DNA

SEQ ID NO: 79166 - DNA, 80 bp, synthetic construct; identical to SEQ ID NO: 45593
  source 1..80: mol_type = other DNA

SEQ ID NO: 79167 - DNA, 80 bp, synthetic construct; identical to SEQ ID NO: 15264
  source 1..80: mol_type = other DNA

SEQ ID NO: 79168 - DNA, 80 bp, synthetic construct; identical to SEQ ID NO: 45595
  source 1..80: mol_type = other DNA

SEQ ID NO: 79169 - DNA, 80 bp, synthetic construct; identical to SEQ ID NO: 45596
  source 1..80: mol_type = other DNA

SEQ ID NO: 79170 - DNA, 80 bp, synthetic construct; identical to SEQ ID NO: 45597
  source 1..80: mol_type = other DNA

SEQ ID NO: 79171 - DNA, 80 bp, synthetic construct; identical to SEQ ID NO: 45598
  source 1..80: mol_type = other DNA

SEQ ID NO: 79172 - DNA, 80 bp, synthetic construct; identical to SEQ ID NO: 45599
  source 1..80: mol_type = other DNA

SEQ ID NO: 79173 - DNA, 80 bp, synthetic construct; identical to SEQ ID NO: 45600
  source 1..80: mol_type = other DNA

SEQ ID NO: 79174 - DNA, 80 bp, synthetic construct; identical to SEQ ID NO: 15265
  source 1..80: mol_type = other DNA

SEQ ID NO: 79175 - DNA, 80 bp, synthetic construct; identical to SEQ ID NO: 45602
  source 1..80: mol_type = other DNA

SEQ ID NO: 79176 - DNA, 80 bp, synthetic construct; identical to SEQ ID NO: 45603
  source 1..80: mol_type = other DNA

SEQ ID NO: 79177 - DNA, 80 bp, synthetic construct; identical to SEQ ID NO: 45604
  source 1..80: mol_type = other DNA

SEQ ID NO: 79178 - DNA, 80 bp, synthetic construct; identical to SEQ ID NO: 15266
  source 1..80: mol_type = other DNA

SEQ ID NO: 79179 - DNA, 80 bp, synthetic construct; identical to SEQ ID NO: 45606
  source 1..80: mol_type = other DNA

SEQ ID NO: 79180 - DNA, 80 bp, synthetic construct; identical to SEQ ID NO: 45607
  source 1..80: mol_type = other DNA

SEQ ID NO: 79181 - DNA, 80 bp, synthetic construct; identical to SEQ ID NO: 45608
  source 1..80: mol_type = other DNA

SEQ ID NO: 79182 - DNA, 80 bp, synthetic construct; identical to SEQ ID NO: 45609
  source 1..80: mol_type = other DNA

SEQ ID NO: 79183 - DNA, 80 bp, synthetic construct; identical to SEQ ID NO: 15267
  source 1..80: mol_type = other DNA

SEQ ID NO: 79184 - DNA, 80 bp, synthetic construct; identical to SEQ ID NO: 45611
  source 1..80: mol_type = other DNA

SEQ ID NO: 79185 - DNA, 80 bp, synthetic construct; identical to SEQ ID NO: 45612
  source 1..80: mol_type = other DNA

SEQ ID NO: 79186 - DNA, 80 bp, synthetic construct; identical to SEQ ID NO: 15268
  source 1..80: mol_type = other DNA

SEQ ID NO: 79187 - DNA, 80 bp, synthetic construct; identical to SEQ ID NO: 45614
  source 1..80: mol_type = other DNA

SEQ ID NO: 79188 - DNA, 80 bp, synthetic construct; identical to SEQ ID NO: 45615
  source 1..80: mol_type = other DNA

SEQ ID NO: 79189 - DNA, 80 bp, synthetic construct; identical to SEQ ID NO: 45616
  source 1..80: mol_type = other DNA

SEQ ID NO: 79190 - DNA, 80 bp, synthetic construct; identical to SEQ ID NO: 45617
  source 1..80: mol_type = other DNA

SEQ ID NO: 79191 - DNA, 80 bp, synthetic construct; identical to SEQ ID NO: 15269
  source 1..80: mol_type = other DNA

SEQ ID NO: 79192 - DNA, 80 bp, synthetic construct; identical to SEQ ID NO: 45619
  source 1..80: mol_type = other DNA

SEQ ID NO: 79193 - DNA, 80 bp, synthetic construct; identical to SEQ ID NO: 15270
  source 1..80: mol_type = other DNA

SEQ ID NO: 79194 - DNA, 80 bp, synthetic construct; identical to SEQ ID NO: 45622
  source 1..80: mol_type = other DNA

SEQ ID NO: 79195 - DNA, 80 bp, synthetic construct; identical to SEQ ID NO: 45623
  source 1..80: mol_type = other DNA

SEQ ID NO: 79196 - DNA, 80 bp, synthetic construct; identical to SEQ ID NO: 15271
  source 1..80: mol_type = other DNA

SEQ ID NO: 79197 - DNA, 80 bp, synthetic construct; identical to SEQ ID NO: 45625
  source 1..80: mol_type = other DNA

SEQ ID NO: 79198 - DNA, 80 bp, synthetic construct; identical to SEQ ID NO: 45626
  source 1..80: mol_type = other DNA

SEQ ID NO: 79199 - DNA, 80 bp, synthetic construct; identical to SEQ ID NO: 45628
  source 1..80: mol_type = other DNA

SEQ ID NO: 79200 - DNA, 80 bp, synthetic construct; identical to SEQ ID NO: 15272
  source 1..80: mol_type = other DNA

SEQ ID NO: 79201 - DNA, 80 bp, synthetic construct; identical to SEQ ID NO: 45630
  source 1..80: mol_type = other DNA

SEQ ID NO: 79202 - DNA, 80 bp, synthetic construct; identical to SEQ ID NO: 45631
  source 1..80: mol_type = other DNA

SEQ ID NO: 79203 - DNA, 80 bp, synthetic construct; identical to SEQ ID NO: 45632
  source 1..80: mol_type = other DNA

SEQ ID NO: 79204 - DNA, 80 bp, synthetic construct; identical to SEQ ID NO: 15273
  source 1..80: mol_type = other DNA

SEQ ID NO: 79205 - DNA, 80 bp, synthetic construct; identical to SEQ ID NO: 45634
  source 1..80: mol_type = other DNA

SEQ ID NO: 79206 - DNA, 80 bp, synthetic construct; identical to SEQ ID NO: 45635
  source 1..80: mol_type = other DNA

SEQ ID NO: 79207 - DNA, 80 bp, synthetic construct; identical to SEQ ID NO: 15274
  source 1..80: mol_type = other DNA

SEQ ID NO: 79208 - DNA, 80 bp, synthetic construct; identical to SEQ ID NO: 45637
  source 1..80: mol_type = other DNA

SEQ ID NO: 79209 - DNA, 80 bp, synthetic construct; identical to SEQ ID NO: 45638
  source 1..80: mol_type = other DNA

SEQ ID NO: 79210 - DNA, 80 bp, synthetic construct; identical to SEQ ID NO: 45639
  source 1..80: mol_type = other DNA

SEQ ID NO: 79211 - DNA, 80 bp, synthetic construct; identical to SEQ ID NO: 45640
  source 1..80: mol_type = other DNA

SEQ ID NO: 79212 - DNA, 80 bp, synthetic construct; identical to SEQ ID NO: 15275
  source 1..80: mol_type = other DNA

SEQ ID NO: 79213 - DNA, 80 bp, synthetic construct; identical to SEQ ID NO: 45642
  source 1..80: mol_type = other DNA

SEQ ID NO: 79214 - DNA, 80 bp, synthetic construct; identical to SEQ ID NO: 45644
  source 1..80: mol_type = other DNA

SEQ ID NO: 79215 - DNA, 80 bp, synthetic construct; identical to SEQ ID NO: 15276
  source 1..80: mol_type = other DNA

SEQ ID NO: 79216 - DNA, 80 bp, synthetic construct; identical to SEQ ID NO: 45646
  source 1..80: mol_type = other DNA

SEQ ID NO: 79217 - DNA, 80 bp, synthetic construct; identical to SEQ ID NO: 45647
  source 1..80: mol_type = other DNA

SEQ ID NO: 79218 - DNA, 80 bp, synthetic construct; identical to SEQ ID NO: 45648
  source 1..80: mol_type = other DNA

SEQ ID NO: 79219 - DNA, 80 bp, synthetic construct; identical to SEQ ID NO: 45649
  source 1..80: mol_type = other DNA

SEQ ID NO: 79220 - DNA, 80 bp, synthetic construct; identical to SEQ ID NO: 15277
  source 1..80: mol_type = other DNA

SEQ ID NO: 79221 - DNA, 80 bp, synthetic construct; identical to SEQ ID NO: 45651
  source 1..80: mol_type = other DNA

SEQ ID NO: 79222 - DNA, 80 bp, synthetic construct; identical to SEQ ID NO: 45652
  source 1..80: mol_type = other DNA

SEQ ID NO: 79223 - DNA, 80 bp, synthetic construct; identical to SEQ ID NO: 15278
  source 1..80: mol_type = other DNA

SEQ ID NO: 79224 - DNA, 80 bp, synthetic construct; identical to SEQ ID NO: 45654
  source 1..80: mol_type = other DNA

SEQ ID NO: 79225 - DNA, 80 bp, synthetic construct; identical to SEQ ID NO: 45655
  source 1..80: mol_type = other DNA

SEQ ID NO: 79226 - DNA, 80 bp, synthetic construct; identical to SEQ ID NO: 15279
  source 1..80: mol_type = other DNA

SEQ ID NO: 79227 - DNA, 80 bp, synthetic construct; identical to SEQ ID NO: 45657
  source 1..80: mol_type = other DNA

SEQ ID NO: 79228 - DNA, 80 bp, synthetic construct; identical to SEQ ID NO: 45658
  source 1..80: mol_type = other DNA

SEQ ID NO: 79229 - DNA, 80 bp, synthetic construct; identical to SEQ ID NO: 45660
  source 1..80: mol_type = other DNA

SEQ ID NO: 79230 - DNA, 80 bp, synthetic construct; identical to SEQ ID NO: 15280
  source 1..80: mol_type = other DNA

SEQ ID NO: 79231 - DNA, 80 bp, synthetic construct; identical to SEQ ID NO: 45662
  source 1..80: mol_type = other DNA

SEQ ID NO: 79232 - DNA, 80 bp, synthetic construct; identical to SEQ ID NO: 45663
  source 1..80: mol_type = other DNA

SEQ ID NO: 79233 - DNA, 80 bp, synthetic construct; identical to SEQ ID NO: 45664
  source 1..80: mol_type = other DNA

SEQ ID NO: 79234 - DNA, 80 bp, synthetic construct; identical to SEQ ID NO: 15281
  source 1..80: mol_type = other DNA

SEQ ID NO: 79235 - DNA, 80 bp, synthetic construct; identical to SEQ ID NO: 45666
  source 1..80: mol_type = other DNA

SEQ ID NO: 79236 - DNA, 80 bp, synthetic construct; identical to SEQ ID NO: 45667
  source 1..80: mol_type = other DNA

SEQ ID NO: 79237 - DNA, 80 bp, synthetic construct; identical to SEQ ID NO: 45668
  source 1..80: mol_type = other DNA

SEQ ID NO: 79238 - DNA, 80 bp, synthetic construct; identical to SEQ ID NO: 15282
  source 1..80: mol_type = other DNA

SEQ ID NO: 79239 - DNA, 80 bp, synthetic construct; identical to SEQ ID NO: 45670
  source 1..80: mol_type = other DNA

SEQ ID NO: 79240 - DNA, 80 bp, synthetic construct; identical to SEQ ID NO: 45671
  source 1..80: mol_type = other DNA

SEQ ID NO: 79241 - DNA, 80 bp, synthetic construct; identical to SEQ ID NO: 15283
  source 1..80: mol_type = other DNA

SEQ ID NO: 79242 - DNA, 80 bp, synthetic construct; identical to SEQ ID NO: 45673
  source 1..80: mol_type = other DNA

SEQ ID NO: 79243 - DNA, 80 bp, synthetic construct; identical to SEQ ID NO: 45674
  source 1..80: mol_type = other DNA

SEQ ID NO: 79244 - DNA, 80 bp, synthetic construct; identical to SEQ ID NO: 45675
  source 1..80: mol_type = other DNA

SEQ ID NO: 79245 - DNA, 80 bp, synthetic construct; identical to SEQ ID NO: 15284
  source 1..80: mol_type = other DNA

SEQ ID NO: 79246 - DNA, 80 bp, synthetic construct; identical to SEQ ID NO: 45677
  source 1..80: mol_type = other DNA

SEQ ID NO: 79247 - DNA, 80 bp, synthetic construct; identical to SEQ ID NO: 45678
  source 1..80: mol_type = other DNA

SEQ ID NO: 79248 - DNA, 80 bp, synthetic construct; identical to SEQ ID NO: 45679
  source 1..80: mol_type = other DNA

SEQ ID NO: 79249 - DNA, 80 bp, synthetic construct; identical to SEQ ID NO: 15285
  source 1..80: mol_type = other DNA

SEQ ID NO: 79250 - DNA, 80 bp, synthetic construct; identical to SEQ ID NO: 45681
  source 1..80: mol_type = other DNA

SEQ ID NO: 79251 - DNA, 80 bp, synthetic construct; identical to SEQ ID NO: 45682
  source 1..80: mol_type = other DNA

SEQ ID NO: 79252 - DNA, 80 bp, synthetic construct; identical to SEQ ID NO: 45683
  source 1..80: mol_type = other DNA

SEQ ID NO: 79253 - DNA, 80 bp, synthetic construct; identical to SEQ ID NO: 45684
  source 1..80: mol_type = other DNA

SEQ ID NO: 79254 - DNA, 80 bp, synthetic construct; identical to SEQ ID NO: 15286
  source 1..80: mol_type = other DNA

SEQ ID NO: 79255 - DNA, 80 bp, synthetic construct; identical to SEQ ID NO: 45686
  source 1..80: mol_type = other DNA

SEQ ID NO: 79256 - DNA, 80 bp, synthetic construct; identical to SEQ ID NO: 45687
  source 1..80: mol_type = other DNA

SEQ ID NO: 79257 - DNA, 80 bp, synthetic construct; identical to SEQ ID NO: 15287
  source 1..80: mol_type = other DNA

SEQ ID NO: 79258 - DNA, 80 bp, synthetic construct; identical to SEQ ID NO: 45690
  source 1..80: mol_type = other DNA

SEQ ID NO: 79259 - DNA, 80 bp, synthetic construct; identical to SEQ ID NO: 45691
  source 1..80: mol_type = other DNA

SEQ ID NO: 79260 - DNA, 80 bp, synthetic construct; identical to SEQ ID NO: 45692
  source 1..80: mol_type = other DNA

SEQ ID NO: 79261 - DNA, 80 bp, synthetic construct; identical to SEQ ID NO: 45693
  source 1..80: mol_type = other DNA

SEQ ID NO: 79262 - DNA, 80 bp, synthetic construct; identical to SEQ ID NO: 15288
  source 1..80: mol_type = other DNA

SEQ ID NO: 79263 - DNA, 80 bp, synthetic construct; identical to SEQ ID NO: 45695
  source 1..80: mol_type = other DNA

SEQ ID NO: 79264 - DNA, 80 bp, synthetic construct; identical to SEQ ID NO: 15289
  source 1..80: mol_type = other DNA

SEQ ID NO: 79265 - DNA, 80 bp, synthetic construct; identical to SEQ ID NO: 45697
  source 1..80: mol_type = other DNA

SEQ ID NO: 79266 - DNA, 80 bp, synthetic construct; identical to SEQ ID NO: 45698
  source 1..80: mol_type = other DNA

SEQ ID NO: 79267 - DNA, 80 bp, synthetic construct; identical to SEQ ID NO: 45699
  source 1..80: mol_type = other DNA

SEQ ID NO: 79268 - DNA, 80 bp, synthetic construct; identical to SEQ ID NO: 45700
  source 1..80: mol_type = other DNA

SEQ ID NO: 79269 - DNA, 80 bp, synthetic construct; identical to SEQ ID NO: 45701
  source 1..80: mol_type = other DNA

SEQ ID NO: 79270 - DNA, 80 bp, synthetic construct; identical to SEQ ID NO: 15290
  source 1..80: mol_type = other DNA

SEQ ID NO: 79271 - DNA, 80 bp, synthetic construct; identical to SEQ ID NO: 45703
  source 1..80: mol_type = other DNA

SEQ ID NO: 79272 - DNA, 80 bp, synthetic construct; identical to SEQ ID NO: 45704
  source 1..80: mol_type = other DNA

SEQ ID NO: 79273 - DNA, 80 bp, synthetic construct; identical to SEQ ID NO: 45705
  source 1..80: mol_type = other DNA

SEQ ID NO: 79274 - DNA, 80 bp, synthetic construct; identical to SEQ ID NO: 45706
  source 1..80: mol_type = other DNA

SEQ ID NO: 79275 - DNA, 80 bp, synthetic construct; identical to SEQ ID NO: 15291
  source 1..80: mol_type = other DNA

SEQ ID NO: 79276 - DNA, 80 bp, synthetic construct; identical to SEQ ID NO: 45708
  source 1..80: mol_type = other DNA

SEQ ID NO: 79277 - DNA, 80 bp, synthetic construct; identical to SEQ ID NO: 45709
  source 1..80: mol_type = other DNA

SEQ ID NO: 79278 - DNA, 80 bp, synthetic construct; identical to SEQ ID NO: 15292
  source 1..80: mol_type = other DNA

SEQ ID NO: 79279 - DNA, 80 bp, synthetic construct; identical to SEQ ID NO: 45711
  source 1..80: mol_type = other DNA

SEQ ID NO: 79280 - DNA, 80 bp, synthetic construct; identical to SEQ ID NO: 45712
  source 1..80: mol_type = other DNA

SEQ ID NO: 79281 - DNA, 80 bp, synthetic construct; identical to SEQ ID NO: 45713
  source 1..80: mol_type = other DNA

SEQ ID NO: 79282 - DNA, 80 bp, synthetic construct; identical to SEQ ID NO: 15293
  source 1..80: mol_type = other DNA

SEQ ID NO: 79283 - DNA, 80 bp, synthetic construct; identical to SEQ ID NO: 45715
  source 1..80: mol_type = other DNA

SEQ ID NO: 79284 - DNA, 80 bp, synthetic construct; identical to SEQ ID NO: 45716
  source 1..80: mol_type = other DNA

SEQ ID NO: 79285 - DNA, 80 bp, synthetic construct; identical to SEQ ID NO: 45717
  source 1..80: mol_type = other DNA

SEQ ID NO: 79286 - DNA, 80 bp, synthetic construct; identical to SEQ ID NO: 45718
  source 1..80: mol_type = other DNA

SEQ ID NO: 79287 - DNA, 80 bp, synthetic construct; identical to SEQ ID NO: 15294
  source 1..80: mol_type = other DNA

SEQ ID NO: 79288 - DNA, 80 bp, synthetic construct; identical to SEQ ID NO: 45720
  source 1..80: mol_type = other DNA

SEQ ID NO: 79289 - DNA, 80 bp, synthetic construct; identical to SEQ ID NO: 45721
  source 1..80: mol_type = other DNA

SEQ ID NO: 79290 - DNA, 80 bp, synthetic construct; identical to SEQ ID NO: 45722
  source 1..80: mol_type = other DNA

SEQ ID NO: 79291 - DNA, 80 bp, synthetic construct; identical to SEQ ID NO: 15295
  source 1..80: mol_type = other DNA

SEQ ID NO: 79292 - DNA, 80 bp, synthetic construct; identical to SEQ ID NO: 45724
  source 1..80: mol_type = other DNA

SEQ ID NO: 79293 - DNA, 80 bp, synthetic construct; identical to SEQ ID NO: 45725
  source 1..80: mol_type = other DNA

SEQ ID NO: 79294 - DNA, 80 bp, synthetic construct; identical to SEQ ID NO: 45727
  source 1..80: mol_type = other DNA

SEQ ID NO: 79295 - DNA, 80 bp, synthetic construct; identical to SEQ ID NO: 45728
  source 1..80: mol_type = other DNA

SEQ ID NO: 79296 - DNA, 80 bp, synthetic construct; identical to SEQ ID NO: 45729
  source 1..80: mol_type = other DNA

SEQ ID NO: 79297 - DNA, 80 bp, synthetic construct; identical to SEQ ID NO: 15297
  source 1..80: mol_type = other DNA

SEQ ID NO: 79298 - DNA, 80 bp, synthetic construct; identical to SEQ ID NO: 45731
  source 1..80: mol_type = other DNA

SEQ ID NO: 79299 - DNA, 80 bp, synthetic construct; identical to SEQ ID NO: 45732
  source 1..80: mol_type = other DNA

SEQ ID NO: 79300 - DNA, 80 bp, synthetic construct; identical to SEQ ID NO: 15298
  source 1..80: mol_type = other DNA

SEQ ID NO: 79301 - DNA, 80 bp, synthetic construct; identical to SEQ ID NO: 45735
  source 1..80: mol_type = other DNA

SEQ ID NO: 79302 - DNA, 80 bp, synthetic construct; identical to SEQ ID NO: 45736
  source 1..80: mol_type = other DNA

SEQ ID NO: 79303 - DNA, 80 bp, synthetic construct; identical to SEQ ID NO: 15299
  source 1..80: mol_type = other DNA

SEQ ID NO: 79304 - DNA, 80 bp, synthetic construct; identical to SEQ ID NO: 45738
  source 1..80: mol_type = other DNA

SEQ ID NO: 79305 - DNA, 80 bp, synthetic construct; identical to SEQ ID NO: 45739
  source 1..80: mol_type = other DNA

SEQ ID NO: 79306 - DNA, 80 bp, synthetic construct; identical to SEQ ID NO: 15300
  source 1..80: mol_type = other DNA

SEQ ID NO: 79307 - DNA, 80 bp, synthetic construct; identical to SEQ ID NO: 45741
  source 1..80: mol_type = other DNA

SEQ ID NO: 79308 - DNA, 80 bp, synthetic construct; identical to SEQ ID NO: 45742
  source 1..80: mol_type = other DNA

SEQ ID NO: 79309 - DNA, 80 bp, synthetic construct; identical to SEQ ID NO: 45743
  source 1..80: mol_type = other DNA

SEQ ID NO: 79310 - DNA, 80 bp, synthetic construct; identical to SEQ ID NO: 45744
  source 1..80: mol_type = other DNA

SEQ ID NO: 79311 - DNA, 80 bp, synthetic construct; identical to SEQ ID NO: 45746
  source 1..80: mol_type = other DNA

SEQ ID NO: 79312 - DNA, 80 bp, synthetic construct; identical to SEQ ID NO: 45747
  source 1..80: mol_type = other DNA

SEQ ID NO: 79313 - DNA, 80 bp, synthetic construct; identical to SEQ ID NO: 15302
  source 1..80: mol_type = other DNA

SEQ ID NO: 79314 - DNA, 80 bp, synthetic construct; identical to SEQ ID NO: 45749
  source 1..80: mol_type = other DNA

SEQ ID NO: 79315 - DNA, 80 bp, synthetic construct; identical to SEQ ID NO: 45750
  source 1..80: mol_type = other DNA

SEQ ID NO: 79316 - DNA, 80 bp, synthetic construct; identical to SEQ ID NO: 45751
  source 1..80: mol_type = other DNA

SEQ ID NO: 79317 - DNA, 80 bp, synthetic construct; identical to SEQ ID NO: 45752
  source 1..80: mol_type = other DNA

SEQ ID NO: 79318 - DNA, 80 bp, synthetic construct; identical to SEQ ID NO: 15303
  source 1..80: mol_type = other DNA

SEQ ID NO: 79319 - DNA, 80 bp, synthetic construct; identical to SEQ ID NO: 45754
  source 1..80: mol_type = other DNA

SEQ ID NO: 79320 - DNA, 80 bp, synthetic construct; identical to SEQ ID NO: 45755
  source 1..80: mol_type = other DNA

SEQ ID NO: 79321 - DNA, 80 bp, synthetic construct; identical to SEQ ID NO: 45756
  source 1..80: mol_type = other DNA

SEQ ID NO: 79322 - DNA, 80 bp, synthetic construct; identical to SEQ ID NO: 15304
  source 1..80: mol_type = other DNA

SEQ ID NO: 79323 - DNA, 80 bp, synthetic construct; identical to SEQ ID NO: 45758
  source 1..80: mol_type = other DNA

SEQ ID NO: 79324 - DNA, 80 bp, synthetic construct; identical to SEQ ID NO: 45759
  source 1..80: mol_type = other DNA

SEQ ID NO: 79325 - DNA, 80 bp, synthetic construct; identical to SEQ ID NO: 45760
  source 1..80: mol_type = other DNA

SEQ ID NO: 79326 - DNA, 80 bp, synthetic construct; identical to SEQ ID NO: 45761
  source 1..80: mol_type = other DNA

SEQ ID NO: 79327 - DNA, 80 bp, synthetic construct; identical to SEQ ID NO: 15305
  source 1..80: mol_type = other DNA

SEQ ID NO: 79328 - DNA, 80 bp, synthetic construct; identical to SEQ ID NO: 45763
  source 1..80: mol_type = other DNA

SEQ ID NO: 79329 - DNA, 80 bp, synthetic construct; identical to SEQ ID NO: 45764
  source 1..80: mol_type = other DNA

SEQ ID NO: 79330 - DNA, 80 bp, synthetic construct; identical to SEQ ID NO: 15306
  source 1..80: mol_type = other DNA

SEQ ID NO: 79331 - DNA, 80 bp, synthetic construct; identical to SEQ ID NO: 45766
  source 1..80: mol_type = other DNA

SEQ ID NO: 79332 - DNA, 80 bp, synthetic construct; identical to SEQ ID NO: 45767
  source 1..80: mol_type = other DNA

SEQ ID NO: 79333 - DNA, 80 bp, synthetic construct; identical to SEQ ID NO: 45768
  source 1..80: mol_type = other DNA

SEQ ID NO: 79334 - DNA, 80 bp, synthetic construct; identical to SEQ ID NO: 15307
  source 1..80: mol_type = other DNA

SEQ ID NO: 79335 - DNA, 80 bp, synthetic construct; identical to SEQ ID NO: 45770
  source 1..80: mol_type = other DNA

SEQ ID NO: 79336 - DNA, 80 bp, synthetic construct; identical to SEQ ID NO: 45771
  source 1..80: mol_type = other DNA

SEQ ID NO: 79337 - DNA, 80 bp, synthetic construct; identical to SEQ ID NO: 45772
  source 1..80: mol_type = other DNA

SEQ ID NO: 79338 - DNA, 80 bp, synthetic construct; identical to SEQ ID NO: 15308
  source 1..80: mol_type = other DNA

SEQ ID NO: 79339 - DNA, 80 bp, synthetic construct; identical to SEQ ID NO: 45774
  source 1..80: mol_type = other DNA

SEQ ID NO: 79340 - DNA, 80 bp, synthetic construct; identical to SEQ ID NO: 45775
  source 1..80: mol_type = other DNA

SEQ ID NO: 79341 - DNA, 80 bp, synthetic construct; identical to SEQ ID NO: 45776
  source 1..80: mol_type = other DNA

SEQ ID NO: 79342 - DNA, 80 bp, synthetic construct; identical to SEQ ID NO: 45777
  source 1..80: mol_type = other DNA

SEQ ID NO: 79343 - DNA, 80 bp, synthetic construct; identical to SEQ ID NO: 15309
  source 1..80: mol_type = other DNA

SEQ ID NO: 79344 - DNA, 80 bp, synthetic construct; identical to SEQ ID NO: 45779
  source 1..80: mol_type = other DNA

SEQ ID NO: 79345 - DNA, 80 bp, synthetic construct; identical to SEQ ID NO: 45780
  source 1..80: mol_type = other DNA

SEQ ID NO: 79346 - DNA, 80 bp, synthetic construct; identical to SEQ ID NO: 15310
  source 1..80: mol_type = other DNA

SEQ ID NO: 79347 - DNA, 80 bp, synthetic construct; identical to SEQ ID NO: 45783
  source 1..80: mol_type = other DNA

SEQ ID NO: 79348 - DNA, 80 bp, synthetic construct; identical to SEQ ID NO: 45784
  source 1..80: mol_type = other DNA

SEQ ID NO: 79349 - DNA, 80 bp, synthetic construct; identical to SEQ ID NO: 45785
  source 1..80: mol_type = other DNA

SEQ ID NO: 79350 - DNA, 80 bp, synthetic construct; identical to SEQ ID NO: 15311
  source 1..80: mol_type = other DNA

SEQ ID NO: 79351 - DNA, 80 bp, synthetic construct; identical to SEQ ID NO: 45787
  source 1..80: mol_type = other DNA

SEQ ID NO: 79352 - DNA, 80 bp, synthetic construct; identical to SEQ ID NO: 45788
  source 1..80: mol_type = other DNA

SEQ ID NO: 79353 - DNA, 80 bp, synthetic construct; identical to SEQ ID NO: 15312
  source 1..80: mol_type = other DNA

SEQ ID NO: 79354 - DNA, 80 bp, synthetic construct; identical to SEQ ID NO: 45790
  source 1..80: mol_type = other DNA

SEQ ID NO: 79355 - DNA, 80 bp, synthetic construct; identical to SEQ ID NO: 45791
  source 1..80: mol_type = other DNA

SEQ ID NO: 79356 - DNA, 80 bp, synthetic construct; identical to SEQ ID NO: 45792
  source 1..80: mol_type = other DNA

SEQ ID NO: 79357 - DNA, 80 bp, synthetic construct; identical to SEQ ID NO: 15313
  source 1..80: mol_type = other DNA

SEQ ID NO: 79358 - DNA, 80 bp, synthetic construct; identical to SEQ ID NO: 45795
  source 1..80: mol_type = other DNA

SEQ ID NO: 79359 - DNA, 80 bp, synthetic construct; identical to SEQ ID NO: 45796
  source 1..80: mol_type = other DNA

SEQ ID NO: 79360 - DNA, 80 bp, synthetic construct; identical to SEQ ID NO: 45797
  source 1..80: mol_type = other DNA

SEQ ID NO: 79361 - DNA, 80 bp, synthetic construct; identical to SEQ ID NO: 15314
  source 1..80: mol_type = other DNA

SEQ ID NO: 79362 - DNA, 80 bp, synthetic construct; identical to SEQ ID NO: 45799
  source 1..80: mol_type = other DNA

SEQ ID NO: 79363 - DNA, 80 bp, synthetic construct; identical to SEQ ID NO: 45800
  source 1..80: mol_type = other DNA

SEQ ID NO: 79364 - DNA, 80 bp, synthetic construct; identical to SEQ ID NO: 15315
  source 1..80: mol_type = other DNA

SEQ ID NO: 79365 - DNA, 80 bp, synthetic construct; identical to SEQ ID NO: 45802
  source 1..80: mol_type = other DNA

SEQ ID NO: 79366 - DNA, 80 bp, synthetic construct; identical to SEQ ID NO: 45803
  source 1..80: mol_type = other DNA

SEQ ID NO: 79367 - DNA, 80 bp, synthetic construct; identical to SEQ ID NO: 45804
  source 1..80: mol_type = other DNA

SEQ ID NO: 79368 - DNA, 80 bp, synthetic construct; identical to SEQ ID NO: 15316
  source 1..80: mol_type = other DNA

SEQ ID NO: 79369 - DNA, 80 bp, synthetic construct; identical to SEQ ID NO: 45806
  source 1..80: mol_type = other DNA

SEQ ID NO: 79370 - DNA, 80 bp, synthetic construct; identical to SEQ ID NO: 45807
  source 1..80: mol_type = other DNA

SEQ ID NO: 79371 - DNA, 80 bp, synthetic construct; identical to SEQ ID NO: 45808
  source 1..80: mol_type = other DNA

SEQ ID NO: 79372 - DNA, 80 bp, synthetic construct; identical to SEQ ID NO: 15317
  source 1..80: mol_type = other DNA

SEQ ID NO: 79373 - DNA, 80 bp, synthetic construct; identical to SEQ ID NO: 45810
  source 1..80: mol_type = other DNA

SEQ ID NO: 79374 - DNA, 80 bp, synthetic construct; identical to SEQ ID NO: 45811
  source 1..80: mol_type = other DNA

SEQ ID NO: 79375 - DNA, 80 bp, synthetic construct; identical to SEQ ID NO: 45812
  source 1..80: mol_type = other DNA

SEQ ID NO: 79376 - DNA, 80 bp, synthetic construct; identical to SEQ ID NO: 15318
  source 1..80: mol_type = other DNA

SEQ ID NO: 79377 - DNA, 80 bp, synthetic construct; identical to SEQ ID NO: 45814
  source 1..80: mol_type = other DNA

SEQ ID NO: 79378 - DNA, 80 bp, synthetic construct; identical to SEQ ID NO: 45815
  source 1..80: mol_type = other DNA

SEQ ID NO: 79379 - DNA, 80 bp, synthetic construct; identical to SEQ ID NO: 45816
  source 1..80: mol_type = other DNA

SEQ ID NO: 79380 - DNA, 80 bp, synthetic construct; identical to SEQ ID NO: 45817
  source 1..80: mol_type = other DNA

SEQ ID NO: 79381 - DNA, 80 bp, synthetic construct; identical to SEQ ID NO: 15319
  source 1..80: mol_type = other DNA

SEQ ID NO: 79382 - DNA, 80 bp, synthetic construct; identical to SEQ ID NO: 45819
  source 1..80: mol_type = other DNA

SEQ ID NO: 79383 - DNA, 80 bp, synthetic construct; identical to SEQ ID NO: 45820
  source 1..80: mol_type = other DNA

SEQ ID NO: 79384 - DNA, 80 bp, synthetic construct; identical to SEQ ID NO: 15320
  source 1..80: mol_type = other DNA

SEQ ID NO: 79385 - DNA, 80 bp, synthetic construct; identical to SEQ ID NO: 45822
  source 1..80: mol_type = other DNA

SEQ ID NO: 79386 - DNA, 80 bp, synthetic construct; identical to SEQ ID NO: 45823
  source 1..80: mol_type = other DNA

SEQ ID NO: 79387 - DNA, 80 bp, synthetic construct; identical to SEQ ID NO: 45824
  source 1..80: mol_type = other DNA

SEQ ID NO: 79388 - DNA, 80 bp, synthetic construct; identical to SEQ ID NO: 15321
  source 1..80: mol_type = other DNA

SEQ ID NO: 79389 - DNA, 80 bp, synthetic construct; identical to SEQ ID NO: 45826
  source 1..80: mol_type = other DNA

SEQ ID NO: 79390 - DNA, 80 bp, synthetic construct; identical to SEQ ID NO: 45827
  source 1..80: mol_type = other DNA

SEQ ID NO: 79391 - DNA, 80 bp, synthetic construct; identical to SEQ ID NO: 45828
  source 1..80: mol_type = other DNA

SEQ ID NO: 79392 - DNA, 80 bp, synthetic construct; identical to SEQ ID NO: 15322
  source 1..80: mol_type = other DNA

SEQ ID NO: 79393 - DNA, 80 bp, synthetic construct; identical to SEQ ID NO: 45830
  source 1..80: mol_type = other DNA

SEQ ID NO: 79394 - DNA, 80 bp, synthetic construct; identical to SEQ ID NO: 45831
  source 1..80: mol_type = other DNA

SEQ ID NO: 79395 - DNA, 80 bp, synthetic construct; identical to SEQ ID NO: 45832
  source 1..80: mol_type = other DNA

SEQ ID NO: 79396 - DNA, 80 bp, synthetic construct; identical to SEQ ID NO: 15323
  source 1..80: mol_type = other DNA

SEQ ID NO: 79397 - DNA, 80 bp, synthetic construct; identical to SEQ ID NO: 45834
  source 1..80: mol_type = other DNA

SEQ ID NO: 79398 - DNA, 80 bp, synthetic construct; identical to SEQ ID NO: 45835
  source 1..80: mol_type = other DNA

SEQ ID NO: 79399 - DNA, 80 bp, synthetic construct; identical to SEQ ID NO: 45836
  source 1..80: mol_type = other DNA

SEQ ID NO: 79400 - DNA, 80 bp, synthetic construct; identical to SEQ ID NO: 15324
  source 1..80: mol_type = other DNA

SEQ ID NO: 79401 - DNA, 80 bp, synthetic construct; identical to SEQ ID NO: 45838
  source 1..80: mol_type = other DNA

SEQ ID NO: 79402 - DNA, 80 bp, synthetic construct; identical to SEQ ID NO: 45839
  source 1..80: mol_type = other DNA

SEQ ID NO: 79403 - DNA, 80 bp, synthetic construct; identical to SEQ ID NO: 45840
  source 1..80: mol_type = other DNA

SEQ ID NO: 79404 - DNA, 80 bp, synthetic construct; identical to SEQ ID NO: 15325
  source 1..80: mol_type = other DNA

SEQ ID NO: 79405 - DNA, 80 bp, synthetic construct; identical to SEQ ID NO: 45842
  source 1..80: mol_type = other DNA

SEQ ID NO: 79406 - DNA, 80 bp, synthetic construct; identical to SEQ ID NO: 45843
  source 1..80: mol_type = other DNA

SEQ ID NO: 79407 - DNA, 80 bp, synthetic construct; identical to SEQ ID NO: 45844
  source 1..80: mol_type = other DNA

SEQ ID NO: 79408 - DNA, 80 bp, synthetic construct; identical to SEQ ID NO: 15326
  source 1..80: mol_type = other DNA

SEQ ID NO: 79409 - DNA, 80 bp, synthetic construct; identical to SEQ ID NO: 45846
  source 1..80: mol_type = other DNA

SEQ ID NO: 79410 - DNA, 80 bp, synthetic construct; identical to SEQ ID NO: 45847
  source 1..80: mol_type = other DNA

SEQ ID NO: 79411 - DNA, 80 bp, synthetic construct; identical to SEQ ID NO: 45848
  source 1..80: mol_type = other DNA

SEQ ID NO: 79412 - DNA, 80 bp, synthetic construct; identical to SEQ ID NO: 45849
  source 1..80: mol_type = other DNA

SEQ ID NO: 79413 - DNA, 80 bp, synthetic construct; identical to SEQ ID NO: 15327
  source 1..80: mol_type = other DNA

SEQ ID NO: 79414 - DNA, 80 bp, synthetic construct; identical to SEQ ID NO: 45851
  source 1..80: mol_type = other DNA

SEQ ID NO: 79415 - DNA, 80 bp, synthetic construct; identical to SEQ ID NO: 45852
  source 1..80: mol_type = other DNA

SEQ ID NO: 79416 - DNA, 80 bp, synthetic construct; identical to SEQ ID NO: 15328
  source 1..80: mol_type = other DNA

SEQ ID NO: 79417 - DNA, 80 bp, synthetic construct; identical to SEQ ID NO: 45854
  source 1..80: mol_type = other DNA

SEQ ID NO: 79418 - DNA, 80 bp, synthetic construct; identical to SEQ ID NO: 45855
  source 1..80: mol_type = other DNA

SEQ ID NO: 79419 - DNA, 80 bp, synthetic construct; identical to SEQ ID NO: 45856
  source 1..80: mol_type = other DNA

SEQ ID NO: 79420 - DNA, 80 bp, synthetic construct; identical to SEQ ID NO: 45857
  source 1..80: mol_type = other DNA

SEQ ID NO: 79421 - DNA, 80 bp, synthetic construct; identical to SEQ ID NO: 15329
  source 1..80: mol_type = other DNA

SEQ ID NO: 79422 - DNA, 80 bp, synthetic construct; identical to SEQ ID NO: 45859
  source 1..80: mol_type = other DNA

SEQ ID NO: 79423 - DNA, 80 bp, synthetic construct; identical to SEQ ID NO: 45860
  source 1..80: mol_type = other DNA

SEQ ID NO: 79424 - DNA, 80 bp, synthetic construct; identical to SEQ ID NO: 45861
  source 1..80: mol_type = other DNA

SEQ ID NO: 79425 - DNA, 80 bp, synthetic construct; identical to SEQ ID NO: 15330
  source 1..80: mol_type = other DNA

SEQ ID NO: 79426 - DNA, 80 bp, synthetic construct; identical to SEQ ID NO: 45863
  source 1..80: mol_type = other DNA

SEQ ID NO: 79427 - DNA, 80 bp, synthetic construct; identical to SEQ ID NO: 45864
  source 1..80: mol_type = other DNA

SEQ ID NO: 79428 - DNA, 80 bp, synthetic construct; identical to SEQ ID NO: 45865
  source 1..80: mol_type = other DNA

SEQ ID NO: 79429 - DNA, 80 bp, synthetic construct; identical to SEQ ID NO: 15331
  source 1..80: mol_type = other DNA

SEQ ID NO: 79430 - DNA, 80 bp, synthetic construct; identical to SEQ ID NO: 45867
  source 1..80: mol_type = other DNA

SEQ ID NO: 79431 - DNA, 80 bp, synthetic construct; identical to SEQ ID NO: 45868
  source 1..80: mol_type = other DNA

SEQ ID NO: 79432 - DNA, 80 bp, synthetic construct; identical to SEQ ID NO: 45869
  source 1..80: mol_type = other DNA

SEQ ID NO: 79433 - DNA, 80 bp, synthetic construct; identical to SEQ ID NO: 15332
  source 1..80: mol_type = other DNA

SEQ ID NO: 79434 - DNA, 80 bp, synthetic construct; identical to SEQ ID NO: 45872
  source 1..80: mol_type = other DNA

SEQ ID NO: 79435 - DNA, 80 bp, synthetic construct; identical to SEQ ID NO: 45873
  source 1..80: mol_type = other DNA

SEQ ID NO: 79436 - DNA, 80 bp, synthetic construct; identical to SEQ ID NO: 15333
  source 1..80: mol_type = other DNA

SEQ ID NO: 79437 - DNA, 80 bp, synthetic construct; identical to SEQ ID NO: 45875
  source 1..80: mol_type = other DNA

SEQ ID NO: 79438 - DNA, 80 bp, synthetic construct; identical to SEQ ID NO: 45876
  source 1..80: mol_type = other DNA

SEQ ID NO: 79439 - DNA, 80 bp, synthetic construct; identical to SEQ ID NO: 45877
  source 1..80: mol_type = other DNA

SEQ ID NO: 79440 - DNA, 80 bp, synthetic construct; identical to SEQ ID NO: 15334
  source 1..80: mol_type = other DNA

SEQ ID NO: 79441 - DNA, 80 bp, synthetic construct; identical to SEQ ID NO: 45879
  source 1..80: mol_type = other DNA

SEQ ID NO: 79442 - DNA, 80 bp, synthetic construct; identical to SEQ ID NO: 45880
  source 1..80: mol_type = other DNA

SEQ ID NO: 79443 - DNA, 80 bp, synthetic construct; identical to SEQ ID NO: 15335
  source 1..80: mol_type = other DNA

SEQ ID NO: 79444 - DNA, 80 bp, synthetic construct; identical to SEQ ID NO: 45883
  source 1..80: mol_type = other DNA

SEQ ID NO: 79445 - DNA, 80 bp, synthetic construct; identical to SEQ ID NO: 45884
  source 1..80: mol_type = other DNA

SEQ ID NO: 79446 - DNA, 80 bp, synthetic construct; identical to SEQ ID NO: 45885
  source 1..80: mol_type = other DNA

SEQ ID NO: 79447 - DNA, 80 bp, synthetic construct; identical to SEQ ID NO: 15336
  source 1..80: mol_type = other DNA

SEQ ID NO: 79448 - DNA, 80 bp, synthetic construct; identical to SEQ ID NO: 45887
  source 1..80: mol_type = other DNA

SEQ ID NO: 79449 - DNA, 80 bp, synthetic construct; identical to SEQ ID NO: 45888
  source 1..80: mol_type = other DNA

SEQ ID NO: 79450 - DNA, 80 bp, synthetic construct; identical to SEQ ID NO: 15337
  source 1..80: mol_type = other DNA

SEQ ID NO: 79451 - DNA, 80 bp, synthetic construct; identical to SEQ ID NO: 45891
  source 1..80: mol_type = other DNA

SEQ ID NO: 79452 - DNA, 80 bp, synthetic construct; identical to SEQ ID NO: 45892
  source 1..80: mol_type = other DNA

SEQ ID NO: 79453 - DNA, 80 bp, synthetic construct; identical to SEQ ID NO: 15338
  source 1..80: mol_type = other DNA

SEQ ID NO: 79454 - DNA, 80 bp, synthetic construct; identical to SEQ ID NO: 45894
  source 1..80: mol_type = other DNA

SEQ ID NO: 79455 - DNA, 80 bp, synthetic construct; identical to SEQ ID NO: 45895
  source 1..80: mol_type = other DNA

SEQ ID NO: 79456 - DNA, 80 bp, synthetic construct; identical to SEQ ID NO: 45896
  source 1..80: mol_type = other DNA

SEQ ID NO: 79457 - DNA, 80 bp, synthetic construct; identical to SEQ ID NO: 15339
  source 1..80: mol_type = other DNA

SEQ ID NO: 79458 - DNA, 80 bp, synthetic construct; identical to SEQ ID NO: 45898
  source 1..80: mol_type = other DNA

SEQ ID NO: 79459 - DNA, 80 bp, synthetic construct; identical to SEQ ID NO: 45899
  source 1..80: mol_type = other DNA

SEQ ID NO: 79460 - DNA, 80 bp, synthetic construct; identical to SEQ ID NO: 45900
  source 1..80: mol_type = other DNA

SEQ ID NO: 79461 - DNA, 80 bp, synthetic construct; identical to SEQ ID NO: 45901
  source 1..80: mol_type = other DNA

SEQ ID NO: 79462 - DNA, 80 bp, synthetic construct; identical to SEQ ID NO: 15340
  source 1..80: mol_type = other DNA

SEQ ID NO: 79463 - DNA, 80 bp, synthetic construct; identical to SEQ ID NO: 45903
  source 1..80: mol_type = other DNA

SEQ ID NO: 79464 - DNA, 80 bp, synthetic construct; identical to SEQ ID NO: 45904
  source 1..80: mol_type = other DNA

SEQ ID NO: 79465 - DNA, 80 bp, synthetic construct; identical to SEQ ID NO: 45905
  source 1..80: mol_type = other DNA

SEQ ID NO: 79466 - DNA, 80 bp, synthetic construct; identical to SEQ ID NO: 15341
  source 1..80: mol_type = other DNA

SEQ ID NO: 79467 - DNA, 80 bp, synthetic construct; identical to SEQ ID NO: 45907
  source 1..80: mol_type = other DNA

SEQ ID NO: 79468 - DNA, 80 bp, synthetic construct; identical to SEQ ID NO: 45908
  source 1..80: mol_type = other DNA

SEQ ID NO: 79469 - DNA, 80 bp, synthetic construct; identical to SEQ ID NO: 15342
  source 1..80: mol_type = other DNA

SEQ ID NO: 79470 - DNA, 80 bp, synthetic construct; identical to SEQ ID NO: 45910
  source 1..80: mol_type = other DNA

SEQ ID NO: 79471 - DNA, 80 bp, synthetic construct; identical to SEQ ID NO: 45911
  source 1..80: mol_type = other DNA

SEQ ID NO: 79472 - DNA, 80 bp, synthetic construct; identical to SEQ ID NO: 45912
  source 1..80: mol_type = other DNA

SEQ ID NO: 79473 - DNA, 80 bp, synthetic construct; identical to SEQ ID NO: 15343
  source 1..80: mol_type = other DNA

SEQ ID NO: 79474 - DNA, 80 bp, synthetic construct; identical to SEQ ID NO: 45915
  source 1..80: mol_type = other DNA

SEQ ID NO: 79475 - DNA, 80 bp, synthetic construct; identical to SEQ ID NO: 45916
  source 1..80: mol_type = other DNA

SEQ ID NO: 79476 - DNA, 80 bp, synthetic construct; identical to SEQ ID NO: 45917
  source 1..80: mol_type = other DNA

SEQ ID NO: 79477 - DNA, 80 bp, synthetic construct; identical to SEQ ID NO: 15344
  source 1..80: mol_type = other DNA

SEQ ID NO: 79478 - DNA, 80 bp, synthetic construct; identical to SEQ ID NO: 45919
  source 1..80: mol_type = other DNA

SEQ ID NO: 79479 - DNA, 80 bp, synthetic construct; identical to SEQ ID NO: 45920
  source 1..80: mol_type = other DNA

SEQ ID NO: 79480 - DNA, 80 bp, synthetic construct; identical to SEQ ID NO: 15345
  source 1..80: mol_type = other DNA

SEQ ID NO: 79481 - DNA, 80 bp, synthetic construct; identical to SEQ ID NO: 45922
  source 1..80: mol_type = other DNA

SEQ ID NO: 79482 - DNA, 80 bp, synthetic construct; identical to SEQ ID NO: 45923
  source 1..80: mol_type = other DNA

SEQ ID NO: 79483 - DNA, 80 bp, synthetic construct; identical to SEQ ID NO: 45924
  source 1..80: mol_type = other DNA

SEQ ID NO: 79484 - DNA, 80 bp, synthetic construct; identical to SEQ ID NO: 45925
  source 1..80: mol_type = other DNA

SEQ ID NO: 79485 - DNA, 80 bp, synthetic construct; identical to SEQ ID NO: 15346
  source 1..80: mol_type = other DNA

SEQ ID NO: 79486 - DNA, 80 bp, synthetic construct; identical to SEQ ID NO: 45927
  source 1..80: mol_type = other DNA

SEQ ID NO: 79487 - DNA, 80 bp, synthetic construct; identical to SEQ ID NO: 45928
  source 1..80: mol_type = other DNA

SEQ ID NO: 79488 - DNA, 80 bp, synthetic construct; identical to SEQ ID NO: 15347
  source 1..80: mol_type = other DNA

SEQ ID NO: 79489 - DNA, 80 bp, synthetic construct; identical to SEQ ID NO: 45930
  source 1..80: mol_type = other DNA

SEQ ID NO: 79490 - DNA, 80 bp, synthetic construct; identical to SEQ ID NO: 45931
  source 1..80: mol_type = other DNA

SEQ ID NO: 79491 - DNA, 80 bp, synthetic construct; identical to SEQ ID NO: 45932
  source 1..80: mol_type = other DNA

SEQ ID NO: 79492 - DNA, 80 bp, synthetic construct; identical to SEQ ID NO: 45933
  source 1..80: mol_type = other DNA

SEQ ID NO: 79493 - DNA, 80 bp, synthetic construct; identical to SEQ ID NO: 15348
  source 1..80: mol_type = other DNA

SEQ ID NO: 79494 - DNA, 80 bp, synthetic construct; identical to SEQ ID NO: 45935
  source 1..80: mol_type = other DNA

SEQ ID NO: 79495 - DNA, 80 bp, synthetic construct; identical to SEQ ID NO: 45936
  source 1..80: mol_type = other DNA

SEQ ID NO: 79496 - DNA, 80 bp, synthetic construct; identical to SEQ ID NO: 15349
  source 1..80: mol_type = other DNA

SEQ ID NO: 79497 - DNA, 80 bp, synthetic construct; identical to SEQ ID NO: 45938
  source 1..80: mol_type = other DNA

SEQ ID NO: 79498 - DNA, 80 bp, synthetic construct; identical to SEQ ID NO: 45939
  source 1..80: mol_type = other DNA

SEQ ID NO: 79499 - DNA, 80 bp, synthetic construct; identical to SEQ ID NO: 45940
  source 1..80: mol_type = other DNA

SEQ ID NO: 79500 - DNA, 80 bp, synthetic construct; identical to SEQ ID NO: 15350
  source 1..80: mol_type = other DNA

SEQ ID NO: 79501 - DNA, 80 bp, synthetic construct; identical to SEQ ID NO: 45942
  source 1..80: mol_type = other DNA

SEQ ID NO: 79502 - DNA, 80 bp, synthetic construct; identical to SEQ ID NO: 45943
  source 1..80: mol_type = other DNA

SEQ ID NO: 79503 - DNA, 80 bp, synthetic construct; identical to SEQ ID NO: 45944
  source 1..80: mol_type = other DNA

SEQ ID NO: 79504 - DNA, 80 bp, synthetic construct; identical to SEQ ID NO: 15351
  source 1..80: mol_type = other DNA

SEQ ID NO: 79505 - DNA, 80 bp, synthetic construct; identical to SEQ ID NO: 45946
  source 1..80: mol_type = other DNA

SEQ ID NO: 79506 - DNA, 80 bp, synthetic construct; identical to SEQ ID NO: 45948
  source 1..80: mol_type = other DNA

SEQ ID NO: 79507 - DNA, 80 bp, synthetic construct; identical to SEQ ID NO: 15352
  source 1..80: mol_type = other DNA

SEQ ID NO: 79508 - DNA, 80 bp, synthetic construct; identical to SEQ ID NO: 45950
  source 1..80: mol_type = other DNA

SEQ ID NO: 79509 - DNA, 80 bp, synthetic construct; identical to SEQ ID NO: 45951
  source 1..80: mol_type = other DNA

SEQ ID NO: 79510 - DNA, 80 bp, synthetic construct; identical to SEQ ID NO: 45952
  source 1..80: mol_type = other DNA

SEQ ID NO: 79511 - DNA, 80 bp, synthetic construct; identical to SEQ ID NO: 45953
  source 1..80: mol_type = other DNA

SEQ ID NO: 79512 - DNA, 80 bp, synthetic construct; identical to SEQ ID NO: 15353
  source 1..80: mol_type = other DNA

SEQ ID NO: 79513 - DNA, 80 bp, synthetic construct; identical to SEQ ID NO: 45955
  source 1..80: mol_type = other DNA

SEQ ID NO: 79514 - DNA, 80 bp, synthetic construct; identical to SEQ ID NO: 45956
  source 1..80: mol_type = other DNA

SEQ ID NO: 79515 - DNA, 80 bp, synthetic construct; identical to SEQ ID NO: 45957
  source 1..80: mol_type = other DNA

SEQ ID NO: 79516 - DNA, 80 bp, synthetic construct; identical to SEQ ID NO: 15354
  source 1..80: mol_type = other DNA

SEQ ID NO: 79517 - DNA, 80 bp, synthetic construct; identical to SEQ ID NO: 45959
  source 1..80: mol_type = other DNA

SEQ ID NO: 79518 - DNA, 80 bp, synthetic construct; identical to SEQ ID NO: 45960
  source 1..80: mol_type = other DNA

SEQ ID NO: 79519 - DNA, 80 bp, synthetic construct; identical to SEQ ID NO: 15355
  source 1..80: mol_type = other DNA

SEQ ID NO: 79520 - DNA, 80 bp, synthetic construct; identical to SEQ ID NO: 45962
  source 1..80: mol_type = other DNA

SEQ ID NO: 79521 - DNA, 80 bp, synthetic construct; identical to SEQ ID NO: 45963
  source 1..80: mol_type = other DNA

SEQ ID NO: 79522 - DNA, 80 bp, synthetic construct; identical to SEQ ID NO: 45964
  source 1..80: mol_type = other DNA

SEQ ID NO: 79523 - DNA, 80 bp, synthetic construct; identical to SEQ ID NO: 15356
  source 1..80: mol_type = other DNA

SEQ ID NO: 79524 - DNA, 80 bp, synthetic construct; identical to SEQ ID NO: 45966
  source 1..80: mol_type = other DNA

SEQ ID NO: 79525 - DNA, 80 bp, synthetic construct; identical to SEQ ID NO: 45968
  source 1..80: mol_type = other DNA

SEQ ID NO: 79526 - DNA, 80 bp, synthetic construct; identical to SEQ ID NO: 15357
  source 1..80: mol_type = other DNA

SEQ ID NO: 79527 - DNA, 80 bp, synthetic construct; identical to SEQ ID NO: 45971
  source 1..80: mol_type = other DNA

SEQ ID NO: 79528 - DNA, 80 bp, synthetic construct; identical to SEQ ID NO: 45972
  source 1..80: mol_type = other DNA

SEQ ID NO: 79529 - DNA, 80 bp, synthetic construct; identical to SEQ ID NO: 45973
  source 1..80: mol_type = other DNA

SEQ ID NO: 79530 - DNA, 80 bp, synthetic construct; identical to SEQ ID NO: 15358
  source 1..80: mol_type = other DNA

SEQ ID NO: 79531 - DNA, 80 bp, synthetic construct; identical to SEQ ID NO: 45975
  source 1..80: mol_type = other DNA

SEQ ID NO: 79532 - DNA, 80 bp, synthetic construct; identical to SEQ ID NO: 45976
  source 1..80: mol_type = other DNA

SEQ ID NO: 79533 - DNA, 80 bp, synthetic construct; identical to SEQ ID NO: 15359
  source 1..80: mol_type = other DNA

SEQ ID NO: 79534 - DNA, 80 bp, synthetic construct; identical to SEQ ID NO: 45978
  source 1..80: mol_type = other DNA

SEQ ID NO: 79535 - DNA, 80 bp, synthetic construct; identical to SEQ ID NO: 45979
  source 1..80: mol_type = other DNA

SEQ ID NO: 79536 - DNA, 80 bp, synthetic construct; identical to SEQ ID NO: 45980
  source 1..80: mol_type = other DNA

SEQ ID NO: 79537 - DNA, 80 bp, synthetic construct; identical to SEQ ID NO: 15360
  source 1..80: mol_type = other DNA

SEQ ID NO: 79538 - DNA, 80 bp, synthetic construct; identical to SEQ ID NO: 45982
  source 1..80: mol_type = other DNA

SEQ ID NO: 79539 - DNA, 80 bp, synthetic construct; identical to SEQ ID NO: 45984
  source 1..80: mol_type = other DNA

SEQ ID NO: 79540 - DNA, 80 bp, synthetic construct; identical to SEQ ID NO: 15361
  source 1..80: mol_type = other DNA

SEQ ID NO: 79541 - DNA, 80 bp, synthetic construct; identical to SEQ ID NO: 45986
  source 1..80: mol_type = other DNA

SEQ ID NO: 79542 - DNA, 80 bp, synthetic construct; identical to SEQ ID NO: 45987
  source 1..80: mol_type = other DNA

SEQ ID NO: 79543 - DNA, 80 bp, synthetic construct; identical to SEQ ID NO: 45988
  source 1..80: mol_type = other DNA

SEQ ID NO: 79544 - DNA, 80 bp, synthetic construct; identical to SEQ ID NO: 15362
  source 1..80: mol_type = other DNA

SEQ ID NO: 79545 - DNA, 80 bp, synthetic construct; identical to SEQ ID NO: 45990
  source 1..80: mol_type = other DNA

SEQ ID NO: 79546 - DNA, 80 bp, synthetic construct; identical to SEQ ID NO: 45991
  source 1..80: mol_type = other DNA

SEQ ID NO: 79547 - DNA, 80 bp, synthetic construct; identical to SEQ ID NO: 45992
  source 1..80: mol_type = other DNA

SEQ ID NO: 79548 - DNA, 80 bp, synthetic construct; identical to SEQ ID NO: 15363
  source 1..80: mol_type = other DNA

SEQ ID NO: 79549 - DNA, 80 bp, synthetic construct; identical to SEQ ID NO: 45994
  source 1..80: mol_type = other DNA

SEQ ID NO: 79550 - DNA, 80 bp, synthetic construct; identical to SEQ ID NO: 45995
  source 1..80: mol_type = other DNA

SEQ ID NO: 79551 - DNA, 80 bp, synthetic construct; identical to SEQ ID NO: 45996
  source 1..80: mol_type = other DNA

SEQ ID NO: 79552 - DNA, 80 bp, synthetic construct; identical to SEQ ID NO: 15364
  source 1..80: mol_type = other DNA

SEQ ID NO: 79553 - DNA, 80 bp, synthetic construct; identical to SEQ ID NO: 45999
  source 1..80: mol_type = other DNA

SEQ ID NO: 79554 - DNA, 80 bp, synthetic construct; identical to SEQ ID NO: 46000
  source 1..80: mol_type = other DNA

SEQ ID NO: 79555 - DNA, 80 bp, synthetic construct; identical to SEQ ID NO: 15365
  source 1..80: mol_type = other DNA

SEQ ID NO: 79556 - DNA, 80 bp, synthetic construct; identical to SEQ ID NO: 46002
  source 1..80: mol_type = other DNA

SEQ ID NO: 79557 - DNA, 80 bp, synthetic construct; identical to SEQ ID NO: 46003
  source 1..80: mol_type = other DNA

SEQ ID NO: 79558 - DNA, 80 bp, synthetic construct; identical to SEQ ID NO: 46004
  source 1..80: mol_type = other DNA

SEQ ID NO: 79559 - DNA, 80 bp, synthetic construct; identical to SEQ ID NO: 15366
  source 1..80: mol_type = other DNA

SEQ ID NO: 79560 - DNA, 80 bp, synthetic construct; identical to SEQ ID NO: 46006
  source 1..80: mol_type = other DNA

SEQ ID NO: 79561 - DNA, 80 bp, synthetic construct; identical to SEQ ID NO: 46007
  source 1..80: mol_type = other DNA

SEQ ID NO: 79562 - DNA, 80 bp, synthetic construct; identical to SEQ ID NO: 15367
  source 1..80: mol_type = other DNA

SEQ ID NO: 79563 - DNA, 80 bp, synthetic construct; identical to SEQ ID NO: 46010
  source 1..80: mol_type = other DNA

SEQ ID NO: 79564 - DNA, 80 bp, synthetic construct; identical to SEQ ID NO: 46011
  source 1..80: mol_type = other DNA

SEQ ID NO: 79565 - DNA, 80 bp, synthetic construct; identical to SEQ ID NO: 46012
  source 1..80: mol_type = other DNA

SEQ ID NO: 79566 - DNA, 80 bp, synthetic construct; identical to SEQ ID NO: 15368
  source 1..80: mol_type = other DNA

SEQ ID NO: 79567 - DNA, 80 bp, synthetic construct; identical to SEQ ID NO: 46014
  source 1..80: mol_type = other DNA

SEQ ID NO: 79568 - DNA, 80 bp, synthetic construct; identical to SEQ ID NO: 46015
  source 1..80: mol_type = other DNA

SEQ ID NO: 79569 - DNA, 80 bp, synthetic construct; identical to SEQ ID NO: 46016
  source 1..80: mol_type = other DNA

SEQ ID NO: 79570 - DNA, 80 bp, synthetic construct; identical to SEQ ID NO: 15369
  source 1..80: mol_type = other DNA

SEQ ID NO: 79571 - DNA, 80 bp, synthetic construct; identical to SEQ ID NO: 46018
  source 1..80: mol_type = other DNA

SEQ ID NO: 79572 - DNA, 80 bp, synthetic construct; identical to SEQ ID NO: 46019
  source 1..80: mol_type = other DNA

SEQ ID NO: 79573 - DNA, 80 bp, synthetic construct; identical to SEQ ID NO: 46020
  source 1..80: mol_type = other DNA

SEQ ID NO: 79574 - DNA, 80 bp, synthetic construct; identical to SEQ ID NO: 15370
  source 1..80: mol_type = other DNA

SEQ ID NO: 79575 - DNA, 80 bp, synthetic construct; identical to SEQ ID NO: 46022
  source 1..80: mol_type = other DNA

SEQ ID NO: 79576 - DNA, 80 bp, synthetic construct; identical to SEQ ID NO: 46023
  source 1..80: mol_type = other DNA

SEQ ID NO: 79577 - DNA, 80 bp, synthetic construct; identical to SEQ ID NO: 46024
  source 1..80: mol_type = other DNA

SEQ ID NO: 79578 - DNA, 80 bp, synthetic construct; identical to SEQ ID NO: 15371
  source 1..80: mol_type = other DNA

SEQ ID NO: 79579 - DNA, 80 bp, synthetic construct; identical to SEQ ID NO: 46026
  source 1..80: mol_type = other DNA

SEQ ID NO: 79580 - DNA, 80 bp, synthetic construct; identical to SEQ ID NO: 46027
  source 1..80: mol_type = other DNA

SEQ ID NO: 79581 - DNA, 80 bp, synthetic construct; identical to SEQ ID NO: 15372
  source 1..80: mol_type = other DNA

SEQ ID NO: 79582 - DNA, 80 bp, synthetic construct; identical to SEQ ID NO: 46029
  source 1..80: mol_type = other DNA

SEQ ID NO: 79583 - DNA, 80 bp, synthetic construct; identical to SEQ ID NO: 46030
  source 1..80: mol_type = other DNA

SEQ ID NO: 79584 - DNA, 80 bp, synthetic construct; identical to SEQ ID NO: 46031
  source 1..80: mol_type = other DNA

SEQ ID NO: 79585 - DNA, 80 bp, synthetic construct; identical to SEQ ID NO: 46032
  source 1..80: mol_type = other DNA

SEQ ID NO: 79586 - DNA, 80 bp, synthetic construct; identical to SEQ ID NO: 15373
  source 1..80: mol_type = other DNA

SEQ ID NO: 79587 - DNA, 80 bp, synthetic construct; identical to SEQ ID NO: 46034
  source 1..80: mol_type = other DNA

SEQ ID NO: 79588 - DNA, 80 bp, synthetic construct; identical to SEQ ID NO: 46035
  source 1..80: mol_type = other DNA

SEQ ID NO: 79589 - DNA, 80 bp, synthetic construct; identical to SEQ ID NO: 46036
  source 1..80: mol_type = other DNA

SEQ ID NO: 79590 - DNA, 80 bp, synthetic construct; identical to SEQ ID NO: 15374
  source 1..80: mol_type = other DNA

SEQ ID NO: 79591 - DNA, 80 bp, synthetic construct; identical to SEQ ID NO: 46038
  source 1..80: mol_type = other DNA

SEQ ID NO: 79592 - DNA, 80 bp, synthetic construct; identical to SEQ ID NO: 46039
  source 1..80: mol_type = other DNA

SEQ ID NO: 79593 - DNA, 80 bp, synthetic construct; identical to SEQ ID NO: 46040
  source 1..80: mol_type = other DNA

SEQ ID NO: 79594 - DNA, 80 bp, synthetic construct; identical to SEQ ID NO: 46041
  source 1..80: mol_type = other DNA

SEQ ID NO: 79595 - DNA, 80 bp, synthetic construct; identical to SEQ ID NO: 15375
  source 1..80: mol_type = other DNA

SEQ ID NO: 79596 - DNA, 80 bp, synthetic construct; identical to SEQ ID NO: 46043
  source 1..80: mol_type = other DNA

SEQ ID NO: 79597 - DNA, 80 bp, synthetic construct; identical to SEQ ID NO: 46044
  source 1..80: mol_type = other DNA

SEQ ID NO: 79598 - DNA, 80 bp, synthetic construct; identical to SEQ ID NO: 15376
  source 1..80: mol_type = other DNA

SEQ ID NO: 79599 - DNA, 80 bp, synthetic construct; identical to SEQ ID NO: 46046
  source 1..80: mol_type = other DNA

SEQ ID NO: 79600 - DNA, 80 bp, synthetic construct; identical to SEQ ID NO: 46047
  source 1..80: mol_type = other DNA

SEQ ID NO: 79601 - DNA, 80 bp, synthetic construct; identical to SEQ ID NO: 46048
  source 1..80: mol_type = other DNA

SEQ ID NO: 79602 - DNA, 80 bp, synthetic construct; identical to SEQ ID NO: 46049
  source 1..80: mol_type = other DNA

SEQ ID NO: 79603 - DNA, 80 bp, synthetic construct; identical to SEQ ID NO: 15377
  source 1..80: mol_type = other DNA

SEQ ID NO: 79604 - DNA, 80 bp, synthetic construct; identical to SEQ ID NO: 46051
  source 1..80: mol_type = other DNA

SEQ ID NO: 79605 - DNA, 80 bp, synthetic construct; identical to SEQ ID NO: 46052
  source 1..80: mol_type = other DNA

SEQ ID NO: 79606 - DNA, 80 bp, synthetic construct; identical to SEQ ID NO: 46053
  source 1..80: mol_type = other DNA

SEQ ID NO: 79607 - DNA, 80 bp, synthetic construct; identical to SEQ ID NO: 15378
  source 1..80: mol_type = other DNA

SEQ ID NO: 79608 - DNA, 80 bp, synthetic construct; identical to SEQ ID NO: 46055
  source 1..80: mol_type = other DNA

SEQ ID NO: 79609 - DNA, 80 bp, synthetic construct; identical to SEQ ID NO: 46056
  source 1..80: mol_type = other DNA

SEQ ID NO: 79610 - DNA, 80 bp, synthetic construct; identical to SEQ ID NO: 15379
  source 1..80: mol_type = other DNA

SEQ ID NO: 79611 - DNA, 80 bp, synthetic construct; identical to SEQ ID NO: 46058
  source 1..80: mol_type = other DNA

SEQ ID NO: 79612 - DNA, 80 bp, synthetic construct; identical to SEQ ID NO: 46060
  source 1..80: mol_type = other DNA

SEQ ID NO: 79613 - DNA, 80 bp, synthetic construct; identical to SEQ ID NO: 46061
  source 1..80: mol_type = other DNA

SEQ ID NO: 79614 - DNA, 80 bp, synthetic construct; identical to SEQ ID NO: 15380
  source 1..80: mol_type = other DNA

SEQ ID NO: 79615 - DNA, 80 bp, synthetic construct; identical to SEQ ID NO: 46064
  source 1..80: mol_type = other DNA

SEQ ID NO: 79616 - DNA, 80 bp, synthetic construct; identical to SEQ ID NO: 46065
  source 1..80: mol_type = other DNA

SEQ ID NO: 79617 - DNA, 80 bp, synthetic construct; identical to SEQ ID NO: 15381
  source 1..80: mol_type = other DNA

SEQ ID NO: 79618 - DNA, 80 bp, synthetic construct; identical to SEQ ID NO: 46067
  source 1..80: mol_type = other DNA

SEQ ID NO: 79619 - DNA, 80 bp, synthetic construct; identical to SEQ ID NO: 46068
  source 1..80: mol_type = other DNA

SEQ ID NO: 79620 - DNA, 80 bp, synthetic construct; identical to SEQ ID NO: 15382
  source 1..80: mol_type = other DNA

SEQ ID NO: 79621 - DNA, 80 bp, synthetic construct; identical to SEQ ID NO: 46070
  source 1..80: mol_type = other DNA

SEQ ID NO: 79622 - DNA, 80 bp, synthetic construct; identical to SEQ ID NO: 46071
  source 1..80: mol_type = other DNA

SEQ ID NO: 79623 - DNA, 80 bp, synthetic construct; identical to SEQ ID NO: 46072
  source 1..80: mol_type = other DNA

SEQ ID NO: 79624 - DNA, 80 bp, synthetic construct; identical to SEQ ID NO: 15383
  source 1..80: mol_type = other DNA

SEQ ID NO: 79625 - DNA, 80 bp, synthetic construct; identical to SEQ ID NO: 46074
  source 1..80: mol_type = other DNA

SEQ ID NO: 79626 - DNA, 80 bp, synthetic construct; identical to SEQ ID NO: 46075
  source 1..80: mol_type = other DNA

SEQ ID NO: 79627 - DNA, 80 bp, synthetic construct; identical to SEQ ID NO: 46076
  source 1..80: mol_type = other DNA

SEQ ID NO: 79628 - DNA, 80 bp, synthetic construct; identical to SEQ ID NO: 46077
  source 1..80: mol_type = other DNA

SEQ ID NO: 79629 - DNA, 80 bp, synthetic construct; identical to SEQ ID NO: 15384
  source 1..80: mol_type = other DNA

SEQ ID NO: 79630 - DNA, 80 bp, synthetic construct; identical to SEQ ID NO: 46079
  source 1..80: mol_type = other DNA

SEQ ID NO: 79631 - DNA, 80 bp, synthetic construct; identical to SEQ ID NO: 46080
  source 1..80: mol_type = other DNA

SEQ ID NO: 79632 - DNA, 80 bp, synthetic construct; identical to SEQ ID NO: 15385
  source 1..80: mol_type = other DNA

SEQ ID NO: 79633 - DNA, 80 bp, synthetic construct; identical to SEQ ID NO: 46082
  source 1..80: mol_type = other DNA

SEQ ID NO: 79634 - DNA, 80 bp, synthetic construct; identical to SEQ ID NO: 46083
  source 1..80: mol_type = other DNA

SEQ ID NO: 79635 - DNA, 80 bp, synthetic construct; identical to SEQ ID NO: 46084
  source 1..80: mol_type = other DNA

SEQ ID NO: 79636 - DNA, 80 bp, synthetic construct; identical to SEQ ID NO: 46085
  source 1..80: mol_type = other DNA

SEQ ID NO: 79637 - DNA, 80 bp, synthetic construct; identical to SEQ ID NO: 15386
  source 1..80: mol_type = other DNA

SEQ ID NO: 79638 - DNA, 80 bp, synthetic construct; identical to SEQ ID NO: 46087
  source 1..80: mol_type = other DNA

SEQ ID NO: 79639 - DNA, 80 bp, synthetic construct; identical to SEQ ID NO: 46088
  source 1..80: mol_type = other DNA

SEQ ID NO: 79640 - DNA, 80 bp, synthetic construct; identical to SEQ ID NO: 15387
  source 1..80: mol_type = other DNA

SEQ ID NO: 79641 - DNA, 80 bp, synthetic construct; identical to SEQ ID NO: 46090
  source 1..80: mol_type = other DNA

SEQ ID NO: 79642 - DNA, 80 bp, synthetic construct; identical to SEQ ID NO: 46091
  source 1..80: mol_type = other DNA

SEQ ID NO: 79643 - DNA, 80 bp, synthetic construct; identical to SEQ ID NO: 46092
  source 1..80: mol_type = other DNA

SEQ ID NO: 79644 - DNA, 80 bp, synthetic construct; identical to SEQ ID NO: 46093
  source 1..80: mol_type = other DNA

SEQ ID NO: 79645 - DNA, 80 bp, synthetic construct; identical to SEQ ID NO: 15388
  source 1..80: mol_type = other DNA

SEQ ID NO: 79646 - DNA, 80 bp, synthetic construct; identical to SEQ ID NO: 46095
  source 1..80: mol_type = other DNA

SEQ ID NO: 79647 - DNA, 80 bp, synthetic construct; identical to SEQ ID NO: 15389
  source 1..80: mol_type = other DNA

SEQ ID NO: 79648 - DNA, 80 bp, synthetic construct; identical to SEQ ID NO: 46098
  source 1..80: mol_type = other DNA

SEQ ID NO: 79649 - DNA, 80 bp, synthetic construct; identical to SEQ ID NO: 46099
  source 1..80: mol_type = other DNA

SEQ ID NO: 79650 - DNA, 80 bp, synthetic construct; identical to SEQ ID NO: 46100
  source 1..80: mol_type = other DNA

SEQ ID NO: 79651 - DNA, 80 bp, synthetic construct; identical to SEQ ID NO: 15390
  source 1..80: mol_type = other DNA

SEQ ID NO: 79652 - DNA, 80 bp, synthetic construct; identical to SEQ ID NO: 46102
  source 1..80: mol_type = other DNA

SEQ ID NO: 79653 - DNA, 80 bp, synthetic construct; identical to SEQ ID NO: 46103
  source 1..80: mol_type = other DNA

SEQ ID NO: 79654 - DNA, 80 bp, synthetic construct; identical to SEQ ID NO: 46104
  source 1..80: mol_type = other DNA

SEQ ID NO: 79655 - DNA, 80 bp, synthetic construct; identical to SEQ ID NO: 46105
  source 1..80: mol_type = other DNA

SEQ ID NO: 79656 - DNA, 80 bp, synthetic construct; identical to SEQ ID NO: 15391
  source 1..80: mol_type = other DNA

SEQ ID NO: 79657 - DNA, 80 bp, synthetic construct; identical to SEQ ID NO: 46107
  source 1..80: mol_type = other DNA

SEQ ID NO: 79658 - DNA, 80 bp, synthetic construct; identical to SEQ ID NO: 46108
  source 1..80: mol_type = other DNA

SEQ ID NO: 79659 - DNA, 80 bp, synthetic construct; identical to SEQ ID NO: 46109
  source 1..80: mol_type = other DNA

SEQ ID NO: 79660 - DNA, 80 bp, synthetic construct; identical to SEQ ID NO: 15392
  source 1..80: mol_type = other DNA

SEQ ID NO: 79661 - DNA, 80 bp, synthetic construct; identical to SEQ ID NO: 46111
  source 1..80: mol_type = other DNA

SEQ ID NO: 79662 - DNA, 80 bp, synthetic construct; identical to SEQ ID NO: 46112
  source 1..80: mol_type = other DNA

SEQ ID NO: 79663 - DNA, 80 bp, synthetic construct; identical to SEQ ID NO: 46113
  source 1..80: mol_type = other DNA

SEQ ID NO: 79664 - DNA, 80 bp, synthetic construct; identical to SEQ ID NO: 15393
  source 1..80: mol_type = other DNA

SEQ ID NO: 79665 - DNA, 80 bp, synthetic construct; identical to SEQ ID NO: 46115
  source 1..80: mol_type = other DNA

SEQ ID NO: 79666 - DNA, 80 bp, synthetic construct; identical to SEQ ID NO: 46116
  source 1..80: mol_type = other DNA

SEQ ID NO: 79667 - DNA, 80 bp, synthetic construct; identical to SEQ ID NO: 46117
  source 1..80: mol_type = other DNA

SEQ ID NO: 79668 - DNA, 80 bp, synthetic construct; identical to SEQ ID NO: 15394
  source 1..80: mol_type = other DNA

SEQ ID NO: 79669 - DNA, 80 bp, synthetic construct; identical to SEQ ID NO: 46119
  source 1..80: mol_type = other DNA

SEQ ID NO: 79670 - DNA, 80 bp, synthetic construct; identical to SEQ ID NO: 46120
  source 1..80: mol_type = other DNA

SEQ ID NO: 79671 - DNA, 80 bp, synthetic construct; identical to SEQ ID NO: 46121
  source 1..80: mol_type = other DNA

SEQ ID NO: 79672 - DNA, 80 bp, synthetic construct; identical to SEQ ID NO: 15395
  source 1..80: mol_type = other DNA

SEQ ID NO: 79673 - DNA, 80 bp, synthetic construct; identical to SEQ ID NO: 46123
  source 1..80: mol_type = other DNA

SEQ ID NO: 79674 - DNA, 80 bp, synthetic construct; identical to SEQ ID NO: 46124
  source 1..80: mol_type = other DNA

SEQ ID NO: 79675 - DNA, 80 bp, synthetic construct; identical to SEQ ID NO: 46125
  source 1..80: mol_type = other DNA

SEQ ID NO: 79676 - DNA, 80 bp, synthetic construct; identical to SEQ ID NO: 15396
  source 1..80: mol_type = other DNA

SEQ ID NO: 79677 - DNA, 80 bp, synthetic construct; identical to SEQ ID NO: 46128
  source 1..80: mol_type = other DNA

SEQ ID NO: 79678 - DNA, 80 bp, synthetic construct; identical to SEQ ID NO: 46129
  source 1..80: mol_type = other DNA

SEQ ID NO: 79679 - DNA, 80 bp, synthetic construct; identical to SEQ ID NO: 15397
  source 1..80: mol_type = other DNA

SEQ ID NO: 79680 - DNA, 80 bp, synthetic construct; identical to SEQ ID NO: 46132
  source 1..80: mol_type = other DNA

SEQ ID NO: 79681 - DNA, 80 bp, synthetic construct; identical to SEQ ID NO: 46133
  source 1..80: mol_type = other DNA

SEQ ID NO: 79682 - DNA, 80 bp, synthetic construct; identical to SEQ ID NO: 15398
  source 1..80: mol_type = other DNA

SEQ ID NO: 79683 - DNA, 80 bp, synthetic construct; identical to SEQ ID NO: 46135
  source 1..80: mol_type = other DNA

SEQ ID NO: 79684 - DNA, 80 bp, synthetic construct; identical to SEQ ID NO: 46136
  source 1..80: mol_type = other DNA

SEQ ID NO: 79685 - DNA, 80 bp, synthetic construct; identical to SEQ ID NO: 46137
  source 1..80: mol_type = other DNA

SEQ ID NO: 79686 - DNA, 80 bp, synthetic construct; identical to SEQ ID NO: 46138
  source 1..80: mol_type = other DNA

SEQ ID NO: 79687 - DNA, 80 bp, synthetic construct; identical to SEQ ID NO: 15399
  source 1..80: mol_type = other DNA

SEQ ID NO: 79688 - DNA, 80 bp, synthetic construct; identical to SEQ ID NO: 46140
  source 1..80: mol_type = other DNA

SEQ ID NO: 79689 - DNA, 80 bp, synthetic construct; identical to SEQ ID NO: 46141
  source 1..80: mol_type = other DNA

SEQ ID NO: 79690 - DNA, 80 bp, synthetic construct; identical to SEQ ID NO: 15400
  source 1..80: mol_type = other DNA

SEQ ID NO: 79691 - DNA, 80 bp, synthetic construct; identical to SEQ ID NO: 46143
  source 1..80: mol_type = other DNA

SEQ ID NO: 79692 - DNA, 80 bp, synthetic construct; identical to SEQ ID NO: 46144
  source 1..80: mol_type = other DNA

SEQ ID NO: 79693 - DNA, 80 bp, synthetic construct; identical to SEQ ID NO: 46145
  source 1..80: mol_type = other DNA

SEQ ID NO: 79694 - DNA, 80 bp, synthetic construct; identical to SEQ ID NO: 15401
  source 1..80: mol_type = other DNA

SEQ ID NO: 79695 - DNA, 80 bp, synthetic construct; identical to SEQ ID NO: 46147
  source 1..80: mol_type = other DNA

SEQ ID NO: 79696 - DNA, 80 bp, synthetic construct; identical to SEQ ID NO: 46148
  source 1..80: mol_type = other DNA

SEQ ID NO: 79697 - DNA, 80 bp, synthetic construct; identical to SEQ ID NO: 46149
  source 1..80: mol_type = other DNA

SEQ ID NO: 79698 - DNA, 80 bp, synthetic construct; identical to SEQ ID NO: 46150
  source 1..80: mol_type = other DNA

SEQ ID NO: 79699 - DNA, 80 bp, synthetic construct; identical to SEQ ID NO: 15402
  source 1..80: mol_type = other DNA

SEQ ID NO: 79700 - DNA, 80 bp, synthetic construct; identical to SEQ ID NO: 46153
  source 1..80: mol_type = other DNA

SEQ ID NO: 79701 - DNA, 80 bp, synthetic construct; identical to SEQ ID NO: 46154
  source 1..80: mol_type = other DNA

SEQ ID NO: 79702 - DNA, 80 bp, synthetic construct; identical to SEQ ID NO: 15403
  source 1..80: mol_type = other DNA

SEQ ID NO: 79703 - DNA, 80 bp, synthetic construct; identical to SEQ ID NO: 46156
  source 1..80: mol_type = other DNA

SEQ ID NO: 79704 - DNA, 80 bp, synthetic construct; identical to SEQ ID NO: 46157
  source 1..80: mol_type = other DNA

SEQ ID NO: 79705 - DNA, 80 bp, synthetic construct; identical to SEQ ID NO: 46158
  source 1..80: mol_type = other DNA

SEQ ID NO: 79706 - DNA, 80 bp, synthetic construct; identical to SEQ ID NO: 15404
  source 1..80: mol_type = other DNA

SEQ ID NO: 79707 - DNA, 80 bp, synthetic construct; identical to SEQ ID NO: 46160
  source 1..80: mol_type = other DNA

SEQ ID NO: 79708 - DNA, 80 bp, synthetic construct; identical to SEQ ID NO: 46161
  source 1..80: mol_type = other DNA

SEQ ID NO: 79709 - DNA, 80 bp, synthetic construct; identical to SEQ ID NO: 46162
  source 1..80: mol_type = other DNA

SEQ ID NO: 79710 - DNA, 80 bp, synthetic construct; identical to SEQ ID NO: 15405
  source 1..80: mol_type = other DNA

SEQ ID NO: 79711 - DNA, 80 bp, synthetic construct; identical to SEQ ID NO: 46164
  source 1..80: mol_type = other DNA

SEQ ID NO: 79712 - DNA, 80 bp, synthetic construct; identical to SEQ ID NO: 46165
  source 1..80: mol_type = other DNA

SEQ ID NO: 79713 - DNA, 80 bp, synthetic construct; identical to SEQ ID NO: 46166
  source 1..80: mol_type = other DNA

SEQ ID NO: 79714 - DNA, 80 bp, synthetic construct; identical to SEQ ID NO: 46167
  source 1..80: mol_type = other DNA

SEQ ID NO: 79715 - DNA, 80 bp, synthetic construct; identical to SEQ ID NO: 15406
  source 1..80: mol_type = other DNA

SEQ ID NO: 79716 - DNA, 80 bp, synthetic construct; identical to SEQ ID NO: 46169
  source 1..80: mol_type = other DNA

SEQ ID NO: 79717 - DNA, 80 bp, synthetic construct; identical to SEQ ID NO: 46170
  source 1..80: mol_type = other DNA

SEQ ID NO: 79718 - DNA, 80 bp, synthetic construct; identical to SEQ ID NO: 15407
  source 1..80: mol_type = other DNA

SEQ ID NO: 79719 - DNA, 80 bp, synthetic construct; identical to SEQ ID NO: 46172
  source 1..80: mol_type = other DNA

SEQ ID NO: 79720 - DNA, 80 bp, synthetic construct; identical to SEQ ID NO: 46173
  source 1..80: mol_type = other DNA

SEQ ID NO: 79721 - DNA, 80 bp, synthetic construct; identical to SEQ ID NO: 46174
  source 1..80: mol_type = other DNA

SEQ ID NO: 79722 - DNA, 80 bp, synthetic construct; identical to SEQ ID NO: 46175
  source 1..80: mol_type = other DNA

SEQ ID NO: 79723 - DNA, 80 bp, synthetic construct; identical to SEQ ID NO: 15408
  source 1..80: mol_type = other DNA

SEQ ID NO: 79724 - DNA, 80 bp, synthetic construct; identical to SEQ ID NO: 46177
  source 1..80: mol_type = other DNA

SEQ ID NO: 79725 - DNA, 80 bp, synthetic construct; identical to SEQ ID NO: 46178
  source 1..80: mol_type = other DNA

SEQ ID NO: 79726 - DNA, 80 bp, synthetic construct; identical to SEQ ID NO: 46179
  source 1..80: mol_type = other DNA

SEQ ID NO: 79727 - DNA, 80 bp, synthetic construct; identical to SEQ ID NO: 15409
  source 1..80: mol_type = other DNA

SEQ ID NO: 79728 - DNA, 80 bp, synthetic construct; identical to SEQ ID NO: 46181
  source 1..80: mol_type = other DNA

SEQ ID NO: 79729 - DNA, 80 bp, synthetic construct; identical to SEQ ID NO: 46182
  source 1..80: mol_type = other DNA

SEQ ID NO: 79730 - DNA, 80 bp, synthetic construct; identical to SEQ ID NO: 15410
  source 1..80: mol_type = other DNA

SEQ ID NO: 79731 - DNA, 80 bp, synthetic construct; identical to SEQ ID NO: 46185
  source 1..80: mol_type = other DNA

SEQ ID NO: 79732 - DNA, 80 bp, synthetic construct; identical to SEQ ID NO: 46186
  source 1..80: mol_type = other DNA

SEQ ID NO: 79733 - DNA, 80 bp, synthetic construct; identical to SEQ ID NO: 15411
  source 1..80: mol_type = other DNA

SEQ ID NO: 79734 - DNA, 80 bp, synthetic construct; identical to SEQ ID NO: 46188
  source 1..80: mol_type = other DNA

SEQ ID NO: 79735 - DNA, 80 bp, synthetic construct; identical to SEQ ID NO: 46189
  source 1..80: mol_type = other DNA

SEQ ID NO: 79736 - DNA, 80 bp, synthetic construct; identical to SEQ ID NO: 46190
  source 1..80: mol_type = other DNA

SEQ ID NO: 79737 - DNA, 80 bp, synthetic construct; identical to SEQ ID NO: 46191
  source 1..80: mol_type = other DNA

SEQ ID NO: 79738 - DNA, 80 bp, synthetic construct; identical to SEQ ID NO: 15412
  source 1..80: mol_type = other DNA

SEQ ID NO: 79739 - DNA, 80 bp, synthetic construct; identical to SEQ ID NO: 46194
  source 1..80: mol_type = other DNA

SEQ ID NO: 79740 - DNA, 80 bp, synthetic construct; identical to SEQ ID NO: 15413
  source 1..80: mol_type = other DNA

SEQ ID NO: 79741 - DNA, 80 bp, synthetic construct; identical to SEQ ID NO: 46196
  source 1..80: mol_type = other DNA

SEQ ID NO: 79742 - DNA, 80 bp, synthetic construct; identical to SEQ ID NO: 46197
  source 1..80: mol_type = other DNA

SEQ ID NO: 79743 - DNA, 80 bp, synthetic construct; identical to SEQ ID NO: 15414
  source 1..80: mol_type = other DNA

SEQ ID NO: 79744 - DNA, 80 bp, synthetic construct; identical to SEQ ID NO: 46200
  source 1..80: mol_type = other DNA

SEQ ID NO: 79745 - DNA, 80 bp, synthetic construct; identical to SEQ ID NO: 46201
  source 1..80: mol_type = other DNA

SEQ ID NO: 79746 - DNA, 80 bp, synthetic construct; identical to SEQ ID NO: 46202
  source 1..80: mol_type = other DNA

SEQ ID NO: 79747 - DNA, 80 bp, synthetic construct; identical to SEQ ID NO: 46203
  source 1..80: mol_type = other DNA

SEQ ID NO: 79748 - DNA, 80 bp, synthetic construct; identical to SEQ ID NO: 15415
  source 1..80: mol_type = other DNA

SEQ ID NO: 79749 - DNA, 80 bp, synthetic construct; identical to SEQ ID NO: 46205
  source 1..80: mol_type = other DNA

SEQ ID NO: 79750 - DNA, 80 bp, synthetic construct; identical to SEQ ID NO: 46206
  source 1..80: mol_type = other DNA

SEQ ID NO: 79751 - DNA, 80 bp, synthetic construct; identical to SEQ ID NO: 15416
  source 1..80: mol_type = other DNA

SEQ ID NO: 79752 - DNA, 80 bp, synthetic construct; identical to SEQ ID NO: 46209
  source 1..80: mol_type = other DNA

SEQ ID NO: 79753 - DNA, 80 bp, synthetic construct; identical to SEQ ID NO: 46210
  source 1..80: mol_type = other DNA

SEQ ID NO: 79754 - DNA, 80 bp, synthetic construct; identical to SEQ ID NO: 15417
  source 1..80: mol_type = other DNA

SEQ ID NO: 79755 - DNA, 80 bp, synthetic construct; identical to SEQ ID NO: 46213
  source 1..80: mol_type = other DNA

SEQ ID NO: 79756 - DNA, 80 bp, synthetic construct; identical to SEQ ID NO: 46214
  source 1..80: mol_type = other DNA

SEQ ID NO: 79757 - DNA, 80 bp, synthetic construct; identical to SEQ ID NO: 15418
  source 1..80: mol_type = other DNA

SEQ ID NO: 79758 - DNA, 80 bp, synthetic construct; identical to SEQ ID NO: 46216
  source 1..80: mol_type = other DNA

SEQ ID NO: 79759 - DNA, 80 bp, synthetic construct; identical to SEQ ID NO: 46217
  source 1..80: mol_type = other DNA

SEQ ID NO: 79760 - DNA, 80 bp, synthetic construct; identical to SEQ ID NO: 46218
  source 1..80: mol_type = other DNA

SEQ ID NO: 79761 - DNA, 80 bp, synthetic construct; identical to SEQ ID NO: 46219
  source 1..80: mol_type = other DNA

SEQ ID NO: 79762 - DNA, 80 bp, synthetic construct; identical to SEQ ID NO: 15419
  source 1..80: mol_type = other DNA

SEQ ID NO: 79763 - DNA, 80 bp, synthetic construct; identical to SEQ ID NO: 46221
  source 1..80: mol_type = other DNA

SEQ ID NO: 79764 - DNA, 80 bp, synthetic construct; identical to SEQ ID NO: 46222
  source 1..80: mol_type = other DNA

SEQ ID NO: 79765 - DNA, 80 bp, synthetic construct; identical to SEQ ID NO: 15420
  source 1..80: mol_type = other DNA

SEQ ID NO: 79766 - DNA, 80 bp, synthetic construct; identical to SEQ ID NO: 46225
  source 1..80: mol_type = other DNA

SEQ ID NO: 79767 - DNA, 80 bp, synthetic construct; identical to SEQ ID NO: 46226
  source 1..80: mol_type = other DNA

SEQ ID NO: 79768 - DNA, 80 bp, synthetic construct; identical to SEQ ID NO: 46227
  source 1..80: mol_type = other DNA

SEQ ID NO: 79769 - DNA, 80 bp, synthetic construct; identical to SEQ ID NO: 15421
  source 1..80: mol_type = other DNA

SEQ ID NO: 79770 - DNA, 80 bp, synthetic construct; identical to SEQ ID NO: 46229
  source 1..80: mol_type = other DNA

SEQ ID NO: 79771 - DNA, 80 bp, synthetic construct; identical to SEQ ID NO: 46230
  source 1..80: mol_type = other DNA

SEQ ID NO: 79772 - DNA, 80 bp, synthetic construct; identical to SEQ ID NO: 15422
  source 1..80: mol_type = other DNA

SEQ ID NO: 79773 - DNA, 80 bp, synthetic construct; identical to SEQ ID NO: 46232
  source 1..80: mol_type = other DNA

SEQ ID NO: 79774 - DNA, 80 bp, synthetic construct; identical to SEQ ID NO: 46233
  source 1..80: mol_type = other DNA

SEQ ID NO: 79775 - DNA, 80 bp, synthetic construct; identical to SEQ ID NO: 15423
  source 1..80: mol_type = other DNA

SEQ ID NO: 79776 - DNA, 80 bp, synthetic construct; identical to SEQ ID NO: 46236
  source 1..80: mol_type = other DNA

SEQ ID NO: 79777 - DNA, 80 bp, synthetic construct; identical to SEQ ID NO: 46237
  source 1..80: mol_type = other DNA

SEQ ID NO: 79778 - DNA, 80 bp, synthetic construct; identical to SEQ ID NO: 46238
  source 1..80: mol_type = other DNA

SEQ ID NO: 79779 - DNA, 80 bp, synthetic construct; identical to SEQ ID NO: 46239
  source 1..80: mol_type = other DNA

SEQ ID NO: 79780 - DNA, 80 bp, synthetic construct; identical to SEQ ID NO: 15424
  source 1..80: mol_type = other DNA

SEQ ID NO: 79781 - DNA, 80 bp, synthetic construct; identical to SEQ ID NO: 46241
  source 1..80: mol_type = other DNA

SEQ ID NO: 79782 - DNA, 80 bp, synthetic construct; identical to SEQ ID NO: 46242
  source 1..80: mol_type = other DNA

SEQ ID NO: 79783 - DNA, 80 bp, synthetic construct; identical to SEQ ID NO: 46243
  source 1..80: mol_type = other DNA

SEQ ID NO: 79784 - DNA, 80 bp, synthetic construct; identical to SEQ ID NO: 15425
  source 1..80: mol_type = other DNA

SEQ ID NO: 79785 - DNA, 80 bp, synthetic construct; identical to SEQ ID NO: 46245
  source 1..80: mol_type = other DNA

SEQ ID NO: 79786 - DNA, 80 bp, synthetic construct; identical to SEQ ID NO: 46246
  source 1..80: mol_type = other DNA

SEQ ID NO: 79787 - DNA, 80 bp, synthetic construct; identical to SEQ ID NO: 46247
  source 1..80: mol_type = other DNA

SEQ ID NO: 79788 - DNA, 80 bp, synthetic construct; identical to SEQ ID NO: 15426
  source 1..80: mol_type = other DNA

SEQ ID NO: 79789 - DNA, 80 bp, synthetic construct; identical to SEQ ID NO: 46249
  source 1..80: mol_type = other DNA

SEQ ID NO: 79790 - DNA, 80 bp, synthetic construct; identical to SEQ ID NO: 46250
  source 1..80: mol_type = other DNA

SEQ ID NO: 79791 - DNA, 80 bp, synthetic construct; identical to SEQ ID NO: 15427
  source 1..80: mol_type = other DNA

SEQ ID NO: 79792 - DNA, 80 bp, synthetic construct; identical to SEQ ID NO: 46252
  source 1..80: mol_type = other DNA

SEQ ID NO: 79793 - DNA, 80 bp, synthetic construct; identical to SEQ ID NO: 46253
  source 1..80: mol_type = other DNA

SEQ ID NO: 79794 - DNA, 80 bp, synthetic construct; identical to SEQ ID NO: 46254
  source 1..80: mol_type = other DNA

SEQ ID NO: 79795 - DNA, 80 bp, synthetic construct; identical to SEQ ID NO: 15428
  source 1..80: mol_type = other DNA

SEQ ID NO: 79796 - DNA, 80 bp, synthetic construct; identical to SEQ ID NO: 46257
  source 1..80: mol_type = other DNA

SEQ ID NO: 79797 - DNA, 80 bp, synthetic construct; identical to SEQ ID NO: 46258
  source 1..80: mol_type = other DNA

SEQ ID NO: 79798 - DNA, 80 bp, synthetic construct; identical to SEQ ID NO: 15429
  source 1..80: mol_type = other DNA

SEQ ID NO: 79799 - DNA, 80 bp, synthetic construct; identical to SEQ ID NO: 46260
  source 1..80: mol_type = other DNA

SEQ ID NO: 79800 - DNA, 80 bp, synthetic construct; identical to SEQ ID NO: 46261
  source 1..80: mol_type = other DNA

SEQ ID NO: 79801 - DNA, 80 bp, synthetic construct; identical to SEQ ID NO: 46262
  source 1..80: mol_type = other DNA

SEQ ID NO: 79802 - DNA, 80 bp, synthetic construct; identical to SEQ ID NO: 15430
  source 1..80: mol_type = other DNA

SEQ ID NO: 79803 - DNA, 80 bp, synthetic construct; identical to SEQ ID NO: 46264
  source 1..80: mol_type = other DNA

SEQ ID NO: 79804 - DNA, 80 bp, synthetic construct; identical to SEQ ID NO: 46265
  source 1..80: mol_type = other DNA

SEQ ID NO: 79805 - DNA, 80 bp, synthetic construct; identical to SEQ ID NO: 46266
  source 1..80: mol_type = other DNA

SEQ ID NO: 79806 - DNA, 80 bp, synthetic construct; identical to SEQ ID NO: 15431
  source 1..80: mol_type = other DNA

SEQ ID NO: 79807 - DNA, 80 bp, synthetic construct; identical to SEQ ID NO: 46268
  source 1..80: mol_type = other DNA

SEQ ID NO: 79808 - DNA, 80 bp, synthetic construct; identical to SEQ ID NO: 46269
  source 1..80: mol_type = other DNA

SEQ ID NO: 79809 - DNA, 80 bp, synthetic construct; identical to SEQ ID NO: 46270
  source 1..80: mol_type = other DNA

SEQ ID NO: 79810 - DNA, 80 bp, synthetic construct; identical to SEQ ID NO: 15432
  source 1..80: mol_type = other DNA

SEQ ID NO: 79811 - DNA, 80 bp, synthetic construct; identical to SEQ ID NO: 46272
  source 1..80: mol_type = other DNA

SEQ ID NO: 79812 - DNA, 80 bp, synthetic construct; identical to SEQ ID NO: 46274
  source 1..80: mol_type = other DNA

SEQ ID NO: 79813 - DNA, 80 bp, synthetic construct; identical to SEQ ID NO: 15433
  source 1..80: mol_type = other DNA

SEQ ID NO: 79814 - DNA, 80 bp, synthetic construct; identical to SEQ ID NO: 46276
  source 1..80: mol_type = other DNA

SEQ ID NO: 79815 - DNA, 80 bp, synthetic construct; identical to SEQ ID NO: 46277
  source 1..80: mol_type = other DNA

SEQ ID NO: 79816 - DNA, 80 bp, synthetic construct; identical to SEQ ID NO: 46278
  source 1..80: mol_type = other DNA

SEQ ID NO: 79817 - DNA, 80 bp, synthetic construct; identical to SEQ ID NO: 15434
  source 1..80: mol_type = other DNA

SEQ ID NO: 79818 - DNA, 80 bp, synthetic construct; identical to SEQ ID NO: 46281
  source 1..80: mol_type = other DNA

SEQ ID NO: 79819 - DNA, 80 bp, synthetic construct; identical to SEQ ID NO: 46282
  source 1..80: mol_type = other DNA

SEQ ID NO: 79820 - DNA, 80 bp, synthetic construct; identical to SEQ ID NO: 15435
  source 1..80: mol_type = other DNA

SEQ ID NO: 79821 - DNA, 80 bp, synthetic construct; identical to SEQ ID NO: 46284
  source 1..80: mol_type = other DNA

SEQ ID NO: 79822 - DNA, 80 bp, synthetic construct; identical to SEQ ID NO: 46285
  source 1..80: mol_type = other DNA

SEQ ID NO: 79823 - DNA, 80 bp, synthetic construct; identical to SEQ ID NO: 46286
  source 1..80: mol_type = other DNA

SEQ ID NO: 79824 - DNA, 80 bp, synthetic construct; identical to SEQ ID NO: 46287
  source 1..80: mol_type = other DNA

SEQ ID NO: 79825 - DNA, 80 bp, synthetic construct; identical to SEQ ID NO: 15436
  source 1..80: mol_type = other DNA

SEQ ID NO: 79826 - DNA, 80 bp, synthetic construct; identical to SEQ ID NO: 46289
  source 1..80: mol_type = other DNA

SEQ ID NO: 79827 - DNA, 80 bp, synthetic construct; identical to SEQ ID NO: 46290
  source 1..80: mol_type = other DNA

SEQ ID NO: 79828 - DNA, 80 bp, synthetic construct; identical to SEQ ID NO: 15437
  source 1..80: mol_type = other DNA

SEQ ID NO: 79829 - DNA, 80 bp, synthetic construct; identical to SEQ ID NO: 46292
  source 1..80: mol_type = other DNA

SEQ ID NO: 79830 - DNA, 80 bp, synthetic construct; identical to SEQ ID NO: 46293
  source 1..80: mol_type = other DNA

SEQ ID NO: 79831 - DNA, 80 bp, synthetic construct; identical to SEQ ID NO: 46294
  source 1..80: mol_type = other DNA

SEQ ID NO: 79832 - DNA, 80 bp, synthetic construct; identical to SEQ ID NO: 46295
  source 1..80: mol_type = other DNA

SEQ ID NO: 79833 - DNA, 80 bp, synthetic construct; identical to SEQ ID NO: 15438
  source 1..80: mol_type = other DNA

SEQ ID NO: 79834 - DNA, 80 bp, synthetic construct; identical to SEQ ID NO: 46297
  source 1..80: mol_type = other DNA

SEQ ID NO: 79835 - DNA, 80 bp, synthetic construct; identical to SEQ ID NO: 46298
  source 1..80: mol_type = other DNA

SEQ ID NO: 79836 - DNA, 80 bp, synthetic construct; identical to SEQ ID NO: 46299
  source 1..80: mol_type = other DNA

SEQ ID NO: 79837 - DNA, 80 bp, synthetic construct; identical to SEQ ID NO: 46300
  source 1..80: mol_type = other DNA

SEQ ID NO: 79838 - DNA, 80 bp, synthetic construct; identical to SEQ ID NO: 15439
  source 1..80: mol_type = other DNA

SEQ ID NO: 79839 - DNA, 80 bp, synthetic construct; identical to SEQ ID NO: 46302
  source 1..80: mol_type = other DNA

SEQ ID NO: 79840 - DNA, 80 bp, synthetic construct; identical to SEQ ID NO: 46303
  source 1..80: mol_type = other DNA

SEQ ID NO: 79841 - DNA, 80 bp, synthetic construct; identical to SEQ ID NO: 46304
  source 1..80: mol_type = other DNA

SEQ ID NO: 79842 - DNA, 80 bp, synthetic construct; identical to SEQ ID NO: 15440
  source 1..80: mol_type = other DNA

SEQ ID NO: 79843 - DNA, 80 bp, synthetic construct; identical to SEQ ID NO: 46306
  source 1..80: mol_type = other DNA

SEQ ID NO: 79844 - DNA, 80 bp, synthetic construct; identical to SEQ ID NO: 15441
  source 1..80: mol_type = other DNA

SEQ ID NO: 79845 - DNA, 80 bp, synthetic construct; identical to SEQ ID NO: 46309
  source 1..80: mol_type = other DNA

SEQ ID NO: 79846 - DNA, 80 bp, synthetic construct; identical to SEQ ID NO: 46310
  source 1..80: mol_type = other DNA

SEQ ID NO: 79847 - DNA, 80 bp, synthetic construct; identical to SEQ ID NO: 46311
  source 1..80: mol_type = other DNA

SEQ ID NO: 79848 - DNA, 80 bp, synthetic construct; identical to SEQ ID NO: 15442
  source 1..80: mol_type = other DNA

SEQ ID NO: 79849 - DNA, 80 bp, synthetic construct; identical to SEQ ID NO: 46313
  source 1..80: mol_type = other DNA

SEQ ID NO: 79850 - DNA, 80 bp, synthetic construct; identical to SEQ ID NO: 46314
  source 1..80: mol_type = other DNA

SEQ ID NO: 79851 - DNA, 80 bp, synthetic construct; identical to SEQ ID NO: 46315
  source 1..80: mol_type = other DNA

SEQ ID NO: 79852 - DNA, 80 bp, synthetic construct; identical to SEQ ID NO: 46316
  source 1..80: mol_type = other DNA

SEQ ID NO: 79853 - DNA, 80 bp, synthetic construct; identical to SEQ ID NO: 15443
  source 1..80: mol_type = other DNA

SEQ ID NO: 79854 - DNA, 80 bp, synthetic construct; identical to SEQ ID NO: 46318
  source 1..80: mol_type = other DNA

SEQ ID NO: 79855 - DNA, 80 bp, synthetic construct; identical to SEQ ID NO: 46319
  source 1..80: mol_type = other DNA

SEQ ID NO: 79856 - DNA, 80 bp, synthetic construct; identical to SEQ ID NO: 15444
  source 1..80: mol_type = other DNA

SEQ ID NO: 79857 - DNA, 80 bp, synthetic construct; identical to SEQ ID NO: 46321
  source 1..80: mol_type = other DNA

SEQ ID NO: 79858 - DNA, 80 bp, synthetic construct; identical to SEQ ID NO: 46322
  source 1..80: mol_type = other DNA

SEQ ID NO: 79859 - DNA, 80 bp, synthetic construct; identical to SEQ ID NO: 46323
  source 1..80: mol_type = other DNA

SEQ ID NO: 79860 - DNA, 80 bp, synthetic construct; identical to SEQ ID NO: 15445
  source 1..80: mol_type = other DNA

SEQ ID NO: 79861 - DNA, 80 bp, synthetic construct; identical to SEQ ID NO: 46325
  source 1..80: mol_type = other DNA

SEQ ID NO: 79862 - DNA, 80 bp, synthetic construct; identical to SEQ ID NO: 46326
  source 1..80: mol_type = other DNA

SEQ ID NO: 79863 - DNA, 80 bp, synthetic construct; identical to SEQ ID NO: 46327
  source 1..80: mol_type = other DNA

SEQ ID NO: 79864 - DNA, 80 bp, synthetic construct; identical to SEQ ID NO: 15446
  source 1..80: mol_type = other DNA

SEQ ID NO: 79865 - DNA, 80 bp, synthetic construct; identical to SEQ ID NO: 46329
  source 1..80: mol_type = other DNA

SEQ ID NO: 79866 - DNA, 80 bp, synthetic construct; identical to SEQ ID NO: 46330
  source 1..80: mol_type = other DNA

SEQ ID NO: 79867 - DNA, 80 bp, synthetic construct; identical to SEQ ID NO: 46331
  source 1..80: mol_type = other DNA

SEQ ID NO: 79868 - DNA, 80 bp, synthetic construct; identical to SEQ ID NO: 46332
  source 1..80: mol_type = other DNA

SEQ ID NO: 79869 - DNA, 80 bp, synthetic construct; identical to SEQ ID NO: 15447
  source 1..80: mol_type = other DNA

SEQ ID NO: 79870 - DNA, 80 bp, synthetic construct; identical to SEQ ID NO: 46334
  source 1..80: mol_type = other DNA

SEQ ID NO: 79871 - DNA, 80 bp, synthetic construct; identical to SEQ ID NO: 46335
  source 1..80: mol_type = other DNA

SEQ ID NO: 79872 - DNA, 80 bp, synthetic construct; identical to SEQ ID NO: 46336
  source 1..80: mol_type = other DNA

SEQ ID NO: 79873 - DNA, 80 bp, synthetic construct; identical to SEQ ID NO: 15448
  source 1..80: mol_type = other DNA

SEQ ID NO: 79874 - DNA, 80 bp, synthetic construct; identical to SEQ ID NO: 46338
  source 1..80: mol_type = other DNA

SEQ ID NO: 79875 - DNA, 80 bp, synthetic construct; identical to SEQ ID NO: 46339
  source 1..80: mol_type = other DNA

SEQ ID NO: 79876 - DNA, 80 bp, synthetic construct; identical to SEQ ID NO: 15449
  source 1..80: mol_type = other DNA

SEQ ID NO: 79877 - DNA, 80 bp, synthetic construct; identical to SEQ ID NO: 46341
  source 1..80: mol_type = other DNA

SEQ ID NO: 79878 - DNA, 80 bp, synthetic construct; identical to SEQ ID NO: 46342
  source 1..80: mol_type = other DNA

SEQ ID NO: 79879 - DNA, 80 bp, synthetic construct; identical to SEQ ID NO: 46343
  source 1..80: mol_type = other DNA

SEQ ID NO: 79880 - DNA, 80 bp, synthetic construct; identical to SEQ ID NO: 15450
  source 1..80: mol_type = other DNA

SEQ ID NO: 79881 - DNA, 80 bp, synthetic construct; identical to SEQ ID NO: 46345
  source 1..80: mol_type = other DNA

SEQ ID NO: 79882 - DNA, 80 bp, synthetic construct; identical to SEQ ID NO: 46346
  source 1..80: mol_type = other DNA

SEQ ID NO: 79883 - DNA, 80 bp, synthetic construct; identical to SEQ ID NO: 15451
  source 1..80: mol_type = other DNA

SEQ ID NO: 79884 - DNA, 80 bp, synthetic construct; identical to SEQ ID NO: 46349
  source 1..80: mol_type = other DNA

SEQ ID NO: 79885 - DNA, 80 bp, synthetic construct; identical to SEQ ID NO: 46350
  source 1..80: mol_type = other DNA

SEQ ID NO: 79886 - DNA, 80 bp, synthetic construct; identical to SEQ ID NO: 46351
  source 1..80: mol_type = other DNA

SEQ ID NO: 79887 - DNA, 80 bp, synthetic construct; identical to SEQ ID NO: 46352
  source 1..80: mol_type = other DNA

SEQ ID NO: 79888 - DNA, 80 bp, synthetic construct; identical to SEQ ID NO: 15452
  source 1..80: mol_type = other DNA

SEQ ID NO: 79889 - DNA, 80 bp, synthetic construct; identical to SEQ ID NO: 46354
  source 1..80: mol_type = other DNA

SEQ ID NO: 79890 - DNA, 80 bp, synthetic construct; identical to SEQ ID NO: 46355
  source 1..80: mol_type = other DNA

SEQ ID NO: 79891 - DNA, 80 bp, synthetic construct; identical to SEQ ID NO: 46356
  source 1..80: mol_type = other DNA

SEQ ID NO: 79892 - DNA, 80 bp, synthetic construct; identical to SEQ ID NO: 15453
  source 1..80: mol_type = other DNA

SEQ ID NO: 79893 - DNA, 80 bp, synthetic construct; identical to SEQ ID NO: 46358
  source 1..80: mol_type = other DNA

SEQ ID NO: 79894 - DNA, 80 bp, synthetic construct; identical to SEQ ID NO: 46359
  source 1..80: mol_type = other DNA

SEQ ID NO: 79895 - DNA, 80 bp, synthetic construct; identical to SEQ ID NO: 46360
  source 1..80: mol_type = other DNA

SEQ ID NO: 79896 - DNA, 80 bp, synthetic construct; identical to SEQ ID NO: 15454
  source 1..80: mol_type = other DNA

SEQ ID NO: 79897 - DNA, 80 bp, synthetic construct; identical to SEQ ID NO: 46362
  source 1..80: mol_type = other DNA

SEQ ID NO: 79898 - DNA, 80 bp, synthetic construct; identical to SEQ ID NO: 46363
  source 1..80: mol_type = other DNA

SEQ ID NO: 79899 - DNA, 80 bp, synthetic construct; identical to SEQ ID NO: 46364
  source 1..80: mol_type = other DNA

SEQ ID NO: 79900 - DNA, 80 bp, synthetic construct; identical to SEQ ID NO: 15455
  source 1..80: mol_type = other DNA

SEQ ID NO: 79901 - DNA, 80 bp, synthetic construct; identical to SEQ ID NO: 46366
  source 1..80: mol_type = other DNA

SEQ ID NO: 79902 - DNA, 80 bp, synthetic construct; identical to SEQ ID NO: 46367
  source 1..80: mol_type = other DNA

SEQ ID NO: 79903 - DNA, 80 bp, synthetic construct; identical to SEQ ID NO: 15456
  source 1..80: mol_type = other DNA

SEQ ID NO: 79904 - DNA, 80 bp, synthetic construct; identical to SEQ ID NO: 46369
  source 1..80: mol_type = other DNA

SEQ ID NO: 79905 - DNA, 80 bp, synthetic construct; identical to SEQ ID NO: 46370
  source 1..80: mol_type = other DNA

SEQ ID NO: 79906 - DNA, 80 bp, synthetic construct; identical to SEQ ID NO: 46371
  source 1..80: mol_type = other DNA

SEQ ID NO: 79907 - DNA, 80 bp, synthetic construct; identical to SEQ ID NO: 46372
  source 1..80: mol_type = other DNA

SEQ ID NO: 79908 - DNA, 80 bp, synthetic construct; identical to SEQ ID NO: 15457
  source 1..80: mol_type = other DNA

SEQ ID NO: 79909 - DNA, 80 bp, synthetic construct; identical to SEQ ID NO: 46374
  source 1..80: mol_type = other DNA

SEQ ID NO: 79910 - DNA, 80 bp, synthetic construct; identical to SEQ ID NO: 46375
  source 1..80: mol_type = other DNA

SEQ ID NO: 79911 - DNA, 80 bp, synthetic construct; identical to SEQ ID NO: 15458
  source 1..80: mol_type = other DNA

SEQ ID NO: 79912 - DNA, 80 bp, synthetic construct; identical to SEQ ID NO: 46377
  source 1..80: mol_type = other DNA

SEQ ID NO: 79913 - DNA, 80 bp, synthetic construct; identical to SEQ ID NO: 46378
  source 1..80: mol_type = other DNA

SEQ ID NO: 79914 - DNA, 80 bp, synthetic construct; identical to SEQ ID NO: 46380
  source 1..80: mol_type = other DNA

SEQ ID NO: 79915 - DNA, 80 bp, synthetic construct; identical to SEQ ID NO: 15459
  source 1..80: mol_type = other DNA

SEQ ID NO: 79916 - DNA, 80 bp, synthetic construct; identical to SEQ ID NO: 46382
  source 1..80: mol_type = other DNA

SEQ ID NO: 79917 - DNA, 80 bp, synthetic construct; identical to SEQ ID NO: 46383
  source 1..80: mol_type = other DNA

SEQ ID NO: 79918 - DNA, 80 bp, synthetic construct; identical to SEQ ID NO: 46384
  source 1..80: mol_type = other DNA

SEQ ID NO: 79919 - DNA, 80 bp, synthetic construct; identical to SEQ ID NO: 15460
  source 1..80: mol_type = other DNA

SEQ ID NO: 79920 - DNA, 80 bp, synthetic construct; identical to SEQ ID NO: 46386
  source 1..80: mol_type = other DNA

SEQ ID NO: 79921 - DNA, 80 bp, synthetic construct; identical to SEQ ID NO: 46387
  source 1..80: mol_type = other DNA

SEQ ID NO: 79922 - DNA, 80 bp, synthetic construct; identical to SEQ ID NO: 15461
  source 1..80: mol_type = other DNA

SEQ ID NO: 79923 - DNA, 80 bp, synthetic construct; identical to SEQ ID NO: 46389
  source 1..80: mol_type = other DNA

SEQ ID NO: 79924 - DNA, 80 bp, synthetic construct; identical to SEQ ID NO: 46390
  source 1..80: mol_type = other DNA

SEQ ID NO: 79925 - DNA, 80 bp, synthetic construct; identical to SEQ ID NO: 46391
  source 1..80: mol_type = other DNA

SEQ ID NO: 79926 - DNA, 80 bp, synthetic construct; identical to SEQ ID NO: 15462
  source 1..80: mol_type = other DNA

SEQ ID NO: 79927 - DNA, 80 bp, synthetic construct; identical to SEQ ID NO: 46393
  source 1..80: mol_type = other DNA

SEQ ID NO: 79928 - DNA, 80 bp, synthetic construct; identical to SEQ ID NO: 46394
  source 1..80: mol_type = other DNA

SEQ ID NO: 79929 - DNA, 80 bp, synthetic construct; identical to SEQ ID NO: 46395
  source 1..80: mol_type = other DNA

SEQ ID NO: 79930 - DNA, 80 bp, synthetic construct; identical to SEQ ID NO: 46396
  source 1..80: mol_type = other DNA

SEQ ID NO: 79931 - DNA, 80 bp, synthetic construct; identical to SEQ ID NO: 15463
  source 1..80: mol_type = other DNA

SEQ ID NO: 79932 - DNA, 80 bp, synthetic construct; identical to SEQ ID NO: 46399
  source 1..80: mol_type = other DNA

SEQ ID NO: 79933 - DNA, 80 bp, synthetic construct; identical to SEQ ID NO: 15464
  source 1..80: mol_type = other DNA

SEQ ID NO: 79934 - DNA, 80 bp, synthetic construct; identical to SEQ ID NO: 46402
  source 1..80: mol_type = other DNA

SEQ ID NO: 79935 - DNA, 80 bp, synthetic construct; identical to SEQ ID NO: 15465
  source 1..80: mol_type = other DNA

SEQ ID NO: 79936 - DNA, 80 bp, synthetic construct; identical to SEQ ID NO: 46406
  source 1..80: mol_type = other DNA

SEQ ID NO: 79937 - DNA, 80 bp, synthetic construct; identical to SEQ ID NO: 15466
  source 1..80: mol_type = other DNA

SEQ ID NO: 79938 - DNA, 80 bp, synthetic construct; identical to SEQ ID NO: 46409
  source 1..80: mol_type = other DNA

SEQ ID NO: 79939 - DNA, 80 bp, synthetic construct; identical to SEQ ID NO: 46411
  source 1..80: mol_type = other DNA

SEQ ID NO: 79940 - DNA, 80 bp, synthetic construct; identical to SEQ ID NO: 46413
  source 1..80: mol_type = other DNA

SEQ ID NO: 79941 - DNA, 80 bp, synthetic construct; identical to SEQ ID NO: 46414
  source 1..80: mol_type = other DNA

SEQ ID NO: 79942 - DNA, 80 bp, synthetic construct; identical to SEQ ID NO: 15468
  source 1..80: mol_type = other DNA

SEQ ID NO: 79943 - DNA, 80 bp, synthetic construct; identical to SEQ ID NO: 46417
  source 1..80: mol_type = other DNA

SEQ ID NO: 79944 - DNA, 80 bp, synthetic construct; identical to SEQ ID NO: 46419
  source 1..80: mol_type = other DNA

SEQ ID NO: 79945 - DNA, 80 bp, synthetic construct; identical to SEQ ID NO: 46420
  source 1..80: mol_type = other DNA

SEQ ID NO: 79946 - DNA, 80 bp, synthetic construct; identical to SEQ ID NO: 15469
  source 1..80: mol_type = other DNA

SEQ ID NO: 79947 - DNA, 80 bp, synthetic construct; identical to SEQ ID NO: 46422
  source 1..80: mol_type = other DNA

SEQ ID NO: 79948 - DNA, 80 bp, synthetic construct; identical to SEQ ID NO: 46423
  source 1..80: mol_type = other DNA

SEQ ID NO: 79949 - DNA, 80 bp, synthetic construct; identical to SEQ ID NO: 46424
  source 1..80: mol_type = other DNA

SEQ ID NO: 79950 - DNA, 80 bp, synthetic construct; identical to SEQ ID NO: 15470
  source 1..80: mol_type = other DNA

SEQ ID NO: 79951 - DNA, 80 bp, synthetic construct; identical to SEQ ID NO: 46426
  source 1..80: mol_type = other DNA

SEQ ID NO: 79952 - DNA, 80 bp, synthetic construct; identical to SEQ ID NO: 46427
  source 1..80: mol_type = other DNA

SEQ ID NO: 79953 - DNA, 80 bp, synthetic construct; identical to SEQ ID NO: 46428
  source 1..80: mol_type = other DNA

SEQ ID NO: 79954 - DNA, 80 bp, synthetic construct; identical to SEQ ID NO: 15471
  source 1..80: mol_type = other DNA

SEQ ID NO: 79955 - DNA, 80 bp, synthetic construct; identical to SEQ ID NO: 46430
  source 1..80: mol_type = other DNA

SEQ ID NO: 79956 - DNA, 80 bp, synthetic construct; identical to SEQ ID NO: 46431
  source 1..80: mol_type = other DNA

SEQ ID NO: 79957 - DNA, 80 bp, synthetic construct; identical to SEQ ID NO: 46432
  source 1..80: mol_type = other DNA

SEQ ID NO: 79958 - DNA, 80 bp, synthetic construct; identical to SEQ ID NO: 46433
  source 1..80: mol_type = other DNA

SEQ ID NO: 79959 - DNA, 80 bp, synthetic construct; identical to SEQ ID NO: 15472
  source 1..80: mol_type = other DNA

SEQ ID NO: 79960 - DNA, 80 bp, synthetic construct; identical to SEQ ID NO: 46435
  source 1..80: mol_type = other DNA

SEQ ID NO: 79961 - DNA, 80 bp, synthetic construct; identical to SEQ ID NO: 46436
  source 1..80: mol_type = other DNA

SEQ ID NO: 79962 - DNA, 80 bp, synthetic construct; identical to SEQ ID NO: 46437
  source 1..80: mol_type = other DNA

SEQ ID NO: 79963 - DNA, 80 bp, synthetic construct; identical to SEQ ID NO: 15473
  source 1..80: mol_type = other DNA

SEQ ID NO: 79964 - DNA, 80 bp, synthetic construct; identical to SEQ ID NO: 46439
  source 1..80: mol_type = other DNA

SEQ ID NO: 79965 - DNA, 80 bp, synthetic construct; identical to SEQ ID NO: 46440
  source 1..80: mol_type = other DNA

SEQ ID NO: 79966 - DNA, 80 bp, synthetic construct; identical to SEQ ID NO: 46441
  source 1..80: mol_type = other DNA

SEQ ID NO: 79967 - DNA, 80 bp, synthetic construct; identical to SEQ ID NO: 15474
  source 1..80: mol_type = other DNA

SEQ ID NO: 79968 - DNA, 80 bp, synthetic construct; identical to SEQ ID NO: 46444
  source 1..80: mol_type = other DNA

SEQ ID NO: 79969 - DNA, 80 bp, synthetic construct; identical to SEQ ID NO: 46445
  source 1..80: mol_type = other DNA

SEQ ID NO: 79970 - DNA, 80 bp, synthetic construct; identical to SEQ ID NO: 15475
  source 1..80: mol_type = other DNA

SEQ ID NO: 79971 - DNA, 80 bp, synthetic construct; identical to SEQ ID NO: 46447
  source 1..80: mol_type = other DNA

SEQ ID NO: 79972 - DNA, 80 bp, synthetic construct; identical to SEQ ID NO: 46448
  source 1..80: mol_type = other DNA

SEQ ID NO: 79973 - DNA, 80 bp, synthetic construct; identical to SEQ ID NO: 46449
  source 1..80: mol_type = other DNA

SEQ ID NO: 79974 - DNA, 80 bp, synthetic construct; identical to SEQ ID NO: 46450
  source 1..80: mol_type = other DNA

SEQ ID NO: 79975 - DNA, 80 bp, synthetic construct; identical to SEQ ID NO: 15476
  source 1..80: mol_type = other DNA

SEQ ID NO: 79976 - DNA, 80 bp, synthetic construct; identical to SEQ ID NO: 46452
  source 1..80: mol_type = other DNA

SEQ ID NO: 79977 - DNA, 80 bp, synthetic construct; identical to SEQ ID NO: 46453
  source 1..80: mol_type = other DNA

SEQ ID NO: 79978 - DNA, 80 bp, synthetic construct; identical to SEQ ID NO: 15477
  source 1..80: mol_type = other DNA

SEQ ID NO: 79979 - DNA, 80 bp, synthetic construct; identical to SEQ ID NO: 46455
  source 1..80: mol_type = other DNA

SEQ ID NO: 79980 - DNA, 80 bp, synthetic construct; identical to SEQ ID NO: 46456
  source 1..80: mol_type = other DNA

SEQ ID NO: 79981 - DNA, 80 bp, synthetic construct; identical to SEQ ID NO: 46458
  source 1..80: mol_type = other DNA

SEQ ID NO: 79982 - DNA, 80 bp, synthetic construct; identical to SEQ ID NO: 15478
  source 1..80: mol_type = other DNA

SEQ ID NO: 79983 - DNA, 80 bp, synthetic construct; identical to SEQ ID NO: 46460
  source 1..80: mol_type = other DNA

SEQ ID NO: 79984 - DNA, 80 bp, synthetic construct; identical to SEQ ID NO: 46461
  source 1..80: mol_type = other DNA

SEQ ID NO: 79985 - DNA, 80 bp, synthetic construct; identical to SEQ ID NO: 46462
  source 1..80: mol_type = other DNA

SEQ ID NO: 79986 - DNA, 80 bp, synthetic construct; identical to SEQ ID NO: 15479
  source 1..80: mol_type = other DNA

SEQ ID NO: 79987 - DNA, 80 bp, synthetic construct; identical to SEQ ID NO: 46464
  source 1..80: mol_type = other DNA

SEQ ID NO: 79988 - DNA, 80 bp, synthetic construct; identical to SEQ ID NO: 46465
  source 1..80: mol_type = other DNA

SEQ ID NO: 79989 - DNA, 80 bp, synthetic construct; identical to SEQ ID NO: 15480
  source 1..80: mol_type = other DNA

SEQ ID NO: 79990 - DNA, 80 bp, synthetic construct; identical to SEQ ID NO: 46467
  source 1..80: mol_type = other DNA

SEQ ID NO: 79991 - DNA, 80 bp, synthetic construct; identical to SEQ ID NO: 46468
  source 1..80: mol_type = other DNA

SEQ ID NO: 79992 - DNA, 80 bp, synthetic construct; identical to SEQ ID NO: 46469
  source 1..80: mol_type = other DNA

SEQ ID NO: 79993 - DNA, 80 bp, synthetic construct; identical to SEQ ID NO: 15481
  source 1..80: mol_type = other DNA

SEQ ID NO: 79994 - DNA, 80 bp, synthetic construct; identical to SEQ ID NO: 46471
  source 1..80: mol_type = other DNA

SEQ ID NO: 79995 - DNA, 80 bp, synthetic construct; identical to SEQ ID NO: 46472
  source 1..80: mol_type = other DNA

SEQ ID NO: 79996 - DNA, 80 bp, synthetic construct; identical to SEQ ID NO: 46473
  source 1..80: mol_type = other DNA

SEQ ID NO: 79997 - DNA, 80 bp, synthetic construct; identical to SEQ ID NO: 15482
  source 1..80: mol_type = other DNA

SEQ ID NO: 79998 - DNA, 80 bp, synthetic construct; identical to SEQ ID NO: 46476
  source 1..80: mol_type = other DNA

SEQ ID NO: 79999 - DNA, 80 bp, synthetic construct; identical to SEQ ID NO: 15483
  source 1..80: mol_type = other DNA

SEQ ID NO: 80000 - DNA, 80 bp, synthetic construct; identical to SEQ ID NO: 46479
  source 1..80: mol_type = other DNA

SEQ ID NO: 80001 - DNA, 80 bp, synthetic construct; identical to SEQ ID NO: 46480
  source 1..80: mol_type = other DNA

SEQ ID NO: 80002 - DNA, 80 bp, synthetic construct; identical to SEQ ID NO: 46481
  source 1..80: mol_type = other DNA

SEQ ID NO: 80003 - DNA, 80 bp, synthetic construct; identical to SEQ ID NO: 15484
  source 1..80: mol_type = other DNA

SEQ ID NO: 80004 - DNA, 80 bp, synthetic construct; identical to SEQ ID NO: 46484
  source 1..80: mol_type = other DNA

SEQ ID NO: 80005 - DNA, 80 bp, synthetic construct; identical to SEQ ID NO: 46485
  source 1..80: mol_type = other DNA

SEQ ID NO: 80006 - DNA, 80 bp, synthetic construct; identical to SEQ ID NO: 46486
  source 1..80: mol_type = other DNA

SEQ ID NO: 80007 - DNA, 80 bp, synthetic construct; identical to SEQ ID NO: 15485
  source 1..80: mol_type = other DNA

SEQ ID NO: 80008 - DNA, 80 bp, synthetic construct; identical to SEQ ID NO: 46488
  source 1..80: mol_type = other DNA

SEQ ID NO: 80009 - DNA, 80 bp, synthetic construct; identical to SEQ ID NO: 46490
  source 1..80: mol_type = other DNA

SEQ ID NO: 80010 - DNA, 80 bp, synthetic construct; identical to SEQ ID NO: 15486
  source 1..80: mol_type = other DNA

SEQ ID NO: 80011 - DNA, 80 bp, synthetic construct; identical to SEQ ID NO: 46492
  source 1..80: mol_type = other DNA

SEQ ID NO: 80012 - DNA, 80 bp, synthetic construct; identical to SEQ ID NO: 46493
  source 1..80: mol_type = other DNA

SEQ ID NO: 80013 - DNA, 80 bp, synthetic construct; identical to SEQ ID NO: 15487
  source 1..80: mol_type = other DNA

SEQ ID NO: 80014 - DNA, 80 bp, synthetic construct; identical to SEQ ID NO: 46496
  source 1..80: mol_type = other DNA

SEQ ID NO: 80015 - DNA, 80 bp, synthetic construct; identical to SEQ ID NO: 46498
  source 1..80: mol_type = other DNA

SEQ ID NO: 80016 - DNA, 80 bp, synthetic construct; identical to SEQ ID NO: 15488
  source 1..80: mol_type = other DNA

SEQ ID NO: 80017 - DNA, 80 bp, synthetic construct; identical to SEQ ID NO: 46500
  source 1..80: mol_type = other DNA

SEQ ID NO: 80018 - DNA, 80 bp, synthetic construct; identical to SEQ ID NO: 46501
  source 1..80: mol_type = other DNA

SEQ ID NO: 80019 - DNA, 80 bp, synthetic construct; identical to SEQ ID NO: 15489
  source 1..80: mol_type = other DNA

SEQ ID NO: 80020 - DNA, 80 bp, synthetic construct; identical to SEQ ID NO: 46503
  source 1..80: mol_type = other DNA

SEQ ID NO: 80021 - DNA, 80 bp, synthetic construct; identical to SEQ ID NO: 46504
  source 1..80: mol_type = other DNA

SEQ ID NO: 80022 - DNA, 80 bp, synthetic construct; identical to SEQ ID NO: 46505
  source 1..80: mol_type = other DNA

SEQ ID NO: 80023 - DNA, 80 bp, synthetic construct; identical to SEQ ID NO: 15490
  source 1..80: mol_type = other DNA

SEQ ID NO: 80024 - DNA, 80 bp, synthetic construct; identical to SEQ ID NO: 46507
  source 1..80: mol_type = other DNA

SEQ ID NO: 80025 - DNA, 80 bp, synthetic construct; identical to SEQ ID NO: 46508
  source 1..80: mol_type = other DNA

SEQ ID NO: 80026 - DNA, 80 bp, synthetic construct; identical to SEQ ID NO: 46509
  source 1..80: mol_type = other DNA

SEQ ID NO: 80027 - DNA, 80 bp, synthetic construct; identical to SEQ ID NO: 15491
  source 1..80: mol_type = other DNA

SEQ ID NO: 80028 - DNA, 80 bp, synthetic construct; identical to SEQ ID NO: 46511
  source 1..80: mol_type = other DNA

SEQ ID NO: 80029 - DNA, 80 bp, synthetic construct; identical to SEQ ID NO: 46512
  source 1..80: mol_type = other DNA

SEQ ID NO: 80030 - DNA, 80 bp, synthetic construct; identical to SEQ ID NO: 46513
  source 1..80: mol_type = other DNA

SEQ ID NO: 80031 - DNA, 80 bp, synthetic construct; identical to SEQ ID NO: 15492
  source 1..80: mol_type = other DNA

SEQ ID NO: 80032 - DNA, 80 bp, synthetic construct; identical to SEQ ID NO: 46515
  source 1..80: mol_type = other DNA

SEQ ID NO: 80033 - DNA, 80 bp, synthetic construct; identical to SEQ ID NO: 46516
  source 1..80: mol_type = other DNA

SEQ ID NO: 80034 - DNA, 80 bp, synthetic construct; identical to SEQ ID NO: 15493
  source 1..80: mol_type = other DNA

SEQ ID NO: 80035 - DNA, 80 bp, synthetic construct; identical to SEQ ID NO: 46519
  source 1..80: mol_type = other DNA

SEQ ID NO: 80036 - DNA, 80 bp, synthetic construct; identical to SEQ ID NO: 46520
  source 1..80: mol_type = other DNA

SEQ ID NO: 80037 - DNA, 80 bp, synthetic construct; identical to SEQ ID NO: 46521
  source 1..80: mol_type = other DNA

SEQ ID NO: 80038 - DNA, 80 bp, synthetic construct; identical to SEQ ID NO: 46522
  source 1..80: mol_type = other DNA

SEQ ID NO: 80039 - DNA, 80 bp, synthetic construct; identical to SEQ ID NO: 15494
  source 1..80: mol_type = other DNA

SEQ ID NO: 80040 - DNA, 80 bp, synthetic construct; identical to SEQ ID NO: 46524
  source 1..80: mol_type = other DNA

SEQ ID NO: 80041 - DNA, 80 bp, synthetic construct; identical to SEQ ID NO: 46525
  source 1..80: mol_type = other DNA

SEQ ID NO: 80042 - DNA, 80 bp, synthetic construct; identical to SEQ ID NO: 15495
  source 1..80: mol_type = other DNA

SEQ ID NO: 80043 - DNA, 80 bp, synthetic construct; identical to SEQ ID NO: 46527
  source 1..80: mol_type = other DNA

SEQ ID NO: 80044 - DNA, 80 bp, synthetic construct; identical to SEQ ID NO: 46528
  source 1..80: mol_type = other DNA

SEQ ID NO: 80045 - DNA, 80 bp, synthetic construct; identical to SEQ ID NO: 46529
  source 1..80: mol_type = other DNA

SEQ ID NO: 80046 - DNA, 80 bp, synthetic construct; identical to SEQ ID NO: 46530
  source 1..80: mol_type = other DNA

SEQ ID NO: 80047 - DNA, 80 bp, synthetic construct; identical to SEQ ID NO: 15496
  source 1..80: mol_type = other DNA

SEQ ID NO: 80048 - DNA, 80 bp, synthetic construct; identical to SEQ ID NO: 46532
  source 1..80: mol_type = other DNA

SEQ ID NO: 80049 - DNA, 80 bp, synthetic construct; identical to SEQ ID NO: 46533
  source 1..80: mol_type = other DNA

SEQ ID NO: 80050 - DNA, 80 bp, synthetic construct; identical to SEQ ID NO: 46534
  source 1..80: mol_type = other DNA

SEQ ID NO: 80051 - DNA, 80 bp, synthetic construct; identical to SEQ ID NO: 15497
  source 1..80: mol_type = other DNA

SEQ ID NO: 80052 - DNA, 80 bp, synthetic construct; identical to SEQ ID NO: 46536
  source 1..80: mol_type = other DNA

SEQ ID NO: 80053 - DNA, 80 bp, synthetic construct; identical to SEQ ID NO: 46537
  source 1..80: mol_type = other DNA

SEQ ID NO: 80054 - DNA, 80 bp, synthetic construct; identical to SEQ ID NO: 15498
  source 1..80: mol_type = other DNA

SEQ ID NO: 80055 - DNA, 80 bp, synthetic construct; identical to SEQ ID NO: 46540
  source 1..80: mol_type = other DNA

SEQ ID NO: 80056 - DNA, 80 bp, synthetic construct; identical to SEQ ID NO: 46541
  source 1..80: mol_type = other DNA

SEQ ID NO: 80057 - DNA, 80 bp, synthetic construct; identical to SEQ ID NO: 46542
  source 1..80: mol_type = other DNA

SEQ ID NO: 80058 - DNA, 80 bp, synthetic construct; identical to SEQ ID NO: 15499
  source 1..80: mol_type = other DNA

SEQ ID NO: 80059 - DNA, 80 bp, synthetic construct; identical to SEQ ID NO: 46544
  source 1..80: mol_type = other DNA

SEQ ID NO: 80060 - DNA, 80 bp, synthetic construct; identical to SEQ ID NO: 46545
  source 1..80: mol_type = other DNA

SEQ ID NO: 80061 - DNA, 80 bp, synthetic construct; identical to SEQ ID NO: 46546
  source 1..80: mol_type = other DNA

SEQ ID NO: 80062 - DNA, 80 bp, synthetic construct; identical to SEQ ID NO: 15500
  source 1..80: mol_type = other DNA

SEQ ID NO: 80063 - DNA, 80 bp, synthetic construct; identical to SEQ ID NO: 46548
  source 1..80: mol_type = other DNA

SEQ ID NO: 80064 - DNA, 80 bp, synthetic construct; identical to SEQ ID NO: 46549
  source 1..80: mol_type = other DNA

SEQ ID NO: 80065 - DNA, 80 bp, synthetic construct; identical to SEQ ID NO: 46550
  source 1..80: mol_type = other DNA

SEQ ID NO: 80066 - DNA, 80 bp, synthetic construct; identical to SEQ ID NO: 15501
  source 1..80: mol_type = other DNA

SEQ ID NO: 80067 - DNA, 80 bp, synthetic construct; identical to SEQ ID NO: 46552
  source 1..80: mol_type = other DNA

SEQ ID NO: 80068 - DNA, 80 bp, synthetic construct; identical to SEQ ID NO: 46553
  source 1..80: mol_type = other DNA

SEQ ID NO: 80069 - DNA, 80 bp, synthetic construct; identical to SEQ ID NO: 15502
  source 1..80: mol_type = other DNA

SEQ ID NO: 80070 - DNA, 80 bp, synthetic construct; identical to SEQ ID NO: 46555
  source 1..80: mol_type = other DNA

SEQ ID NO: 80071 - DNA, 80 bp, synthetic construct; identical to SEQ ID NO: 46556
  source 1..80: mol_type = other DNA

SEQ ID NO: 80072 - DNA, 80 bp, synthetic construct; identical to SEQ ID NO: 46557
  source 1..80: mol_type = other DNA

SEQ ID NO: 80073 - DNA, 80 bp, synthetic construct; identical to SEQ ID NO: 15503
  source 1..80: mol_type = other DNA

SEQ ID NO: 80074 - DNA, 80 bp, synthetic construct; identical to SEQ ID NO: 46559
  source 1..80: mol_type = other DNA

SEQ ID NO: 80075 - DNA, 80 bp, synthetic construct; identical to SEQ ID NO: 46560
  source 1..80: mol_type = other DNA

SEQ ID NO: 80076 - DNA, 80 bp, synthetic construct; identical to SEQ ID NO: 46561
  source 1..80: mol_type = other DNA

SEQ ID NO: 80077 - DNA, 80 bp, synthetic construct; identical to SEQ ID NO: 15504
  source 1..80: mol_type = other DNA

SEQ ID NO: 80078 - DNA, 80 bp, synthetic construct; identical to SEQ ID NO: 46564
  source 1..80: mol_type = other DNA

SEQ ID NO: 80079 - DNA, 80 bp, synthetic construct; identical to SEQ ID NO: 46565
  source 1..80: mol_type = other DNA

SEQ ID NO: 80080 - DNA, 80 bp, synthetic construct; identical to SEQ ID NO: 15505
  source 1..80: mol_type = other DNA

SEQ ID NO: 80081 - DNA, 80 bp, synthetic construct; identical to SEQ ID NO: 46567
  source 1..80: mol_type = other DNA

SEQ ID NO: 80082 - DNA, 80 bp, synthetic construct; identical to SEQ ID NO: 46568
  source 1..80: mol_type = other DNA

SEQ ID NO: 80083 - DNA, 80 bp, synthetic construct; identical to SEQ ID NO: 15506
  source 1..80: mol_type = other DNA

SEQ ID NO: 80084 - DNA, 80 bp, synthetic construct; identical to SEQ ID NO: 46570
  source 1..80: mol_type = other DNA

SEQ ID NO: 80085 - DNA, 80 bp, synthetic construct; identical to SEQ ID NO: 46571
  source 1..80: mol_type = other DNA

SEQ ID NO: 80086 - DNA, 80 bp, synthetic construct; identical to SEQ ID NO: 46572
  source 1..80: mol_type = other DNA

SEQ ID NO: 80087 - DNA, 80 bp, synthetic construct; identical to SEQ ID NO: 15507
  source 1..80: mol_type = other DNA

SEQ ID NO: 80088 - DNA, 80 bp, synthetic construct; identical to SEQ ID NO: 46574
  source 1..80: mol_type = other DNA

SEQ ID NO: 80089 - DNA, 80 bp, synthetic construct; identical to SEQ ID NO: 46575
  source 1..80: mol_type = other DNA

SEQ ID NO: 80090 - DNA, 80 bp, synthetic construct; identical to SEQ ID NO: 46576
  source 1..80: mol_type = other DNA

SEQ ID NO: 80091 - DNA, 80 bp, synthetic construct; identical to SEQ ID NO: 15508
  source 1..80: mol_type = other DNA

SEQ ID NO: 80092 - DNA, 80 bp, synthetic construct; identical to SEQ ID NO: 46578
  source 1..80: mol_type = other DNA

SEQ ID NO: 80093 - DNA, 80 bp, synthetic construct; identical to SEQ ID NO: 46579
  source 1..80: mol_type = other DNA

SEQ ID NO: 80094 - DNA, 80 bp, synthetic construct; identical to SEQ ID NO: 46580
  source 1..80: mol_type = other DNA

SEQ ID NO: 80095 - DNA, 80 bp, synthetic construct; identical to SEQ ID NO: 15509
  source 1..80: mol_type = other DNA

SEQ ID NO: 80096 - DNA, 80 bp, synthetic construct; identical to SEQ ID NO: 46583
  source 1..80: mol_type = other DNA

SEQ ID NO: 80097 - DNA, 80 bp, synthetic construct; identical to SEQ ID NO: 46584
  source 1..80: mol_type = other DNA

SEQ ID NO: 80098 - DNA, 80 bp, synthetic construct; identical to SEQ ID NO: 15510
  source 1..80: mol_type = other DNA

SEQ ID NO: 80099 - DNA, 80 bp, synthetic construct; identical to SEQ ID NO: 46586
  source 1..80: mol_type = other DNA

SEQ ID NO: 80100 - DNA, 80 bp, synthetic construct; identical to SEQ ID NO: 46588
  source 1..80: mol_type = other DNA

SEQ ID NO: 80101 - DNA, 80 bp, synthetic construct; identical to SEQ ID NO: 15511
  source 1..80: mol_type = other DNA

SEQ ID NO: 80102 - DNA, 80 bp, synthetic construct; identical to SEQ ID NO: 46590
  source 1..80: mol_type = other DNA

SEQ ID NO: 80103 - DNA, 80 bp, synthetic construct; identical to SEQ ID NO: 46591
  source 1..80: mol_type = other DNA

SEQ ID NO: 80104 - DNA, 80 bp, synthetic construct; identical to SEQ ID NO: 46592
  source 1..80: mol_type = other DNA

SEQ ID NO: 80105 - DNA, 80 bp, synthetic construct; identical to SEQ ID NO: 46593
  source 1..80: mol_type = other DNA

SEQ ID NO: 80106 - DNA, 80 bp, synthetic construct; identical to SEQ ID NO: 15512
  source 1..80: mol_type = other DNA

SEQ ID NO: 80107 - DNA, 80 bp, synthetic construct; identical to SEQ ID NO: 46595
  source 1..80: mol_type = other DNA

SEQ ID NO: 80108 - DNA, 80 bp, synthetic construct; identical to SEQ ID NO: 46596
  source 1..80: mol_type = other DNA

SEQ ID NO: 80109 - DNA, 80 bp, synthetic construct; identical to SEQ ID NO: 46597
  source 1..80: mol_type = other DNA

SEQ ID NO: 80110 - DNA, 80 bp, synthetic construct; identical to SEQ ID NO: 15513
  source 1..80: mol_type = other DNA

SEQ ID NO: 80111 - DNA, 80 bp, synthetic construct; identical to SEQ ID NO: 46599
  source 1..80: mol_type = other DNA

SEQ ID NO: 80112 - DNA, 80 bp, synthetic construct; identical to SEQ ID NO: 46600
  source 1..80: mol_type = other DNA

SEQ ID NO: 80113 - DNA, 80 bp, synthetic construct; identical to SEQ ID NO: 15514
  source 1..80: mol_type = other DNA

SEQ ID NO: 80114 - DNA, 80 bp, synthetic construct; identical to SEQ ID NO: 46602
  source 1..80: mol_type = other DNA

SEQ ID NO: 80115 - DNA, 80 bp, synthetic construct; identical to SEQ ID NO: 46603
  source 1..80: mol_type = other DNA

SEQ ID NO: 80116 - DNA, 80 bp, synthetic construct; identical to SEQ ID NO: 46605
  source 1..80: mol_type = other DNA

SEQ ID NO: 80117 - DNA, 80 bp, synthetic construct; identical to SEQ ID NO: 15515
  source 1..80: mol_type = other DNA

SEQ ID NO: 80118 - DNA, 80 bp, synthetic construct; identical to SEQ ID NO: 46607
  source 1..80: mol_type = other DNA

SEQ ID NO: 80119 - DNA, 80 bp, synthetic construct; identical to SEQ ID NO: 46608
  source 1..80: mol_type = other DNA

SEQ ID NO: 80120 - DNA, 80 bp, synthetic construct; identical to SEQ ID NO: 15516
  source 1..80: mol_type = other DNA

SEQ ID NO: 80121 - DNA, 80 bp, synthetic construct; identical to SEQ ID NO: 46611
  source 1..80: mol_type = other DNA

SEQ ID NO: 80122 - DNA, 80 bp, synthetic construct; identical to SEQ ID NO: 46612
  source 1..80: mol_type = other DNA

SEQ ID NO: 80123 - DNA, 80 bp, synthetic construct; identical to SEQ ID NO: 15517
  source 1..80: mol_type = other DNA

SEQ ID NO: 80124 - DNA, 80 bp, synthetic construct; identical to SEQ ID NO: 46614
  source 1..80: mol_type = other DNA

SEQ ID NO: 80125 - DNA, 80 bp, synthetic construct; identical to SEQ ID NO: 46615
  source 1..80: mol_type = other DNA

SEQ ID NO: 80126 - DNA, 80 bp, synthetic construct; identical to SEQ ID NO: 46616
  source 1..80: mol_type = other DNA

SEQ ID NO: 80127 - DNA, 80 bp, synthetic construct; identical to SEQ ID NO: 15518
  source 1..80: mol_type = other DNA

SEQ ID NO: 80128 - DNA, 80 bp, synthetic construct; identical to SEQ ID NO: 46618
  source 1..80: mol_type = other DNA

SEQ ID NO: 80129 - DNA, 80 bp, synthetic construct; identical to SEQ ID NO: 46619
  source 1..80: mol_type = other DNA

SEQ ID NO: 80130 - DNA, 80 bp, synthetic construct; identical to SEQ ID NO: 46620
  source 1..80: mol_type = other DNA

SEQ ID NO: 80131 - DNA, 80 bp, synthetic construct; identical to SEQ ID NO: 15519
  source 1..80: mol_type = other DNA

SEQ ID NO: 80132 - DNA, 80 bp, synthetic construct; identical to SEQ ID NO: 46622
  source 1..80: mol_type = other DNA

SEQ ID NO: 80133 - DNA, 80 bp, synthetic construct; identical to SEQ ID NO: 46623
  source 1..80: mol_type = other DNA

SEQ ID NO: 80134 - DNA, 80 bp, synthetic construct; identical to SEQ ID NO: 46624
  source 1..80: mol_type = other DNA

SEQ ID NO: 80135 - DNA, 80 bp, synthetic construct; identical to SEQ ID NO: 15520
  source 1..80: mol_type = other DNA

SEQ ID NO: 80136 - DNA, 80 bp, synthetic construct; identical to SEQ ID NO: 46626
  source 1..80: mol_type = other DNA

SEQ ID NO: 80137 - DNA, 80 bp, synthetic construct; identical to SEQ ID NO: 46627
  source 1..80: mol_type = other DNA

SEQ ID NO: 80138 - DNA, 80 bp, synthetic construct; identical to SEQ ID NO: 46628
  source 1..80: mol_type = other DNA

SEQ ID NO: 80139 - DNA, 80 bp, synthetic construct; identical to SEQ ID NO: 15521
  source 1..80: mol_type = other DNA

SEQ ID NO: 80140 - DNA, 80 bp, synthetic construct; identical to SEQ ID NO: 46630
  source 1..80: mol_type = other DNA

SEQ ID NO: 80141 - DNA, 80 bp, synthetic construct; identical to SEQ ID NO: 46632
  source 1..80: mol_type = other DNA

SEQ ID NO: 80142 - DNA, 80 bp, synthetic construct; identical to SEQ ID NO: 46634
  source 1..80: mol_type = other DNA

SEQ ID NO: 80143 - DNA, 80 bp, synthetic construct; identical to SEQ ID NO: 46635
  source 1..80: mol_type = other DNA

SEQ ID NO: 80144 - DNA, 80 bp, synthetic construct; identical to SEQ ID NO: 46636
  source 1..80: mol_type = other DNA

SEQ ID NO: 80145 - DNA, 80 bp, synthetic construct; identical to SEQ ID NO: 46637
  source 1..80: mol_type = other DNA

SEQ ID NO: 80146 - DNA, 80 bp, synthetic construct; identical to SEQ ID NO: 15523
  source 1..80: mol_type = other DNA

SEQ ID NO: 80147 - DNA, 80 bp, synthetic construct; identical to SEQ ID NO: 46639
  source 1..80: mol_type = other DNA

SEQ ID NO: 80148 - DNA, 80 bp, synthetic construct; identical to SEQ ID NO: 46640
  source 1..80: mol_type = other DNA

SEQ ID NO: 80149 - DNA, 80 bp, synthetic construct; identical to SEQ ID NO: 15524
  source 1..80: mol_type = other DNA

SEQ ID NO: 80150 - DNA, 80 bp, synthetic construct; identical to SEQ ID NO: 46643
  source 1..80: mol_type = other DNA

SEQ ID NO: 80151 - DNA, 80 bp, synthetic construct; identical to SEQ ID NO: 46644
  source 1..80: mol_type = other DNA

SEQ ID NO: 80152 - DNA, 80 bp, synthetic construct; identical to SEQ ID NO: 15525
  source 1..80: mol_type = other DNA

SEQ ID NO: 80153 - DNA, 80 bp, synthetic construct; identical to SEQ ID NO: 46646
  source 1..80: mol_type = other DNA

SEQ ID NO: 80154 - DNA, 80 bp, synthetic construct; identical to SEQ ID NO: 46647
  source 1..80: mol_type = other DNA

SEQ ID NO: 80155 - DNA, 80 bp, synthetic construct; identical to SEQ ID NO: 46648
  source 1..80: mol_type = other DNA

SEQ ID NO: 80156 - DNA, 80 bp, synthetic construct; identical to SEQ ID NO: 46649
  source 1..80: mol_type = other DNA

SEQ ID NO: 80157 - DNA, 80 bp, synthetic construct; identical to SEQ ID NO: 15526
  source 1..80: mol_type = other DNA

SEQ ID NO: 80158 - DNA, 80 bp, synthetic construct; identical to SEQ ID NO: 46651
  source 1..80: mol_type = other DNA

SEQ ID NO: 80159 - DNA, 80 bp, synthetic construct; identical to SEQ ID NO: 46652
  source 1..80: mol_type = other DNA

SEQ ID NO: 80160 - DNA, 80 bp, synthetic construct; identical to SEQ ID NO: 15527
  source 1..80: mol_type = other DNA

SEQ ID NO: 80161 - DNA, 80 bp, synthetic construct; identical to SEQ ID NO: 46654
  source 1..80: mol_type = other DNA

SEQ ID NO: 80162 - DNA, 80 bp, synthetic construct; identical to SEQ ID NO: 46655
  source 1..80: mol_type = other DNA

SEQ ID NO: 80163 - DNA, 80 bp, synthetic construct; identical to SEQ ID NO: 46656
  source 1..80: mol_type = other DNA

SEQ ID NO: 80164 - DNA, 80 bp, synthetic construct; identical to SEQ ID NO: 15528
  source 1..80: mol_type = other DNA

SEQ ID NO: 80165 - DNA, 80 bp, synthetic construct; identical to SEQ ID NO: 46659
  source 1..80: mol_type = other DNA

SEQ ID NO: 80166 - DNA, 80 bp, synthetic construct; identical to SEQ ID NO: 46660
  source 1..80: mol_type = other DNA

SEQ ID NO: 80167 - DNA, 80 bp, synthetic construct; identical to SEQ ID NO: 46661
  source 1..80: mol_type = other DNA

SEQ ID NO: 80168 - DNA, 80 bp, synthetic construct; identical to SEQ ID NO: 15529
  source 1..80: mol_type = other DNA

SEQ ID NO: 80169 - DNA, 80 bp, synthetic construct; identical to SEQ ID NO: 46663
  source 1..80: mol_type = other DNA

SEQ ID NO: 80170 - DNA, 80 bp, synthetic construct; identical to SEQ ID NO: 46664
  source 1..80: mol_type = other DNA

SEQ ID NO: 80171 - DNA, 80 bp, synthetic construct; identical to SEQ ID NO: 15530
  source 1..80: mol_type = other DNA

SEQ ID NO: 80172 - DNA, 80 bp, synthetic construct; identical to SEQ ID NO: 46666
  source 1..80: mol_type = other DNA

SEQ ID NO: 80173 - DNA, 80 bp, synthetic construct; identical to SEQ ID NO: 46668
  source 1..80: mol_type = other DNA

SEQ ID NO: 80174 - DNA, 80 bp, synthetic construct; identical to SEQ ID NO: 15531
  source 1..80: mol_type = other DNA

SEQ ID NO: 80175 - DNA, 80 bp, synthetic construct; identical to SEQ ID NO: 46670
  source 1..80: mol_type = other DNA

SEQ ID NO: 80176 - DNA, 80 bp, synthetic construct; identical to SEQ ID NO: 46671
  source 1..80: mol_type = other DNA

SEQ ID NO: 80177 - DNA, 80 bp, synthetic construct; identical to SEQ ID NO: 46672
  source 1..80: mol_type = other DNA

SEQ ID NO: 80178 - DNA, 80 bp, synthetic construct; identical to SEQ ID NO: 15532
  source 1..80: mol_type = other DNA

SEQ ID NO: 80179 - DNA, 80 bp, synthetic construct; identical to SEQ ID NO: 46674
  source 1..80: mol_type = other DNA

SEQ ID NO: 80180 - DNA, 80 bp, synthetic construct; identical to SEQ ID NO: 46675
  source 1..80: mol_type = other DNA

SEQ ID NO: 80181 - DNA, 80 bp, synthetic construct; identical to SEQ ID NO: 46676
  source 1..80: mol_type = other DNA

SEQ ID NO: 80182 - DNA, 80 bp, synthetic construct; identical to SEQ ID NO: 15533
  source 1..80: mol_type = other DNA

SEQ ID NO: 80183 - DNA, 80 bp, synthetic construct; identical to SEQ ID NO: 46678
  source 1..80: mol_type = other DNA

SEQ ID NO: 80184 - DNA, 80 bp, synthetic construct; identical to SEQ ID NO: 46679
  source 1..80: mol_type = other DNA

SEQ ID NO: 80185 - DNA, 80 bp, synthetic construct; identical to SEQ ID NO: 46681
  source 1..80: mol_type = other DNA

SEQ ID NO: 80186 - DNA, 80 bp, synthetic construct; identical to SEQ ID NO: 15534
  source 1..80: mol_type = other DNA

SEQ ID NO: 80187 - DNA, 80 bp, synthetic construct; identical to SEQ ID NO: 46683
  source 1..80: mol_type = other DNA

SEQ ID NO: 80188 - DNA, 80 bp, synthetic construct; identical to SEQ ID NO: 46684
  source 1..80: mol_type = other DNA

SEQ ID NO: 80189 - DNA, 80 bp, synthetic construct; identical to SEQ ID NO: 15535
  source 1..80: mol_type = other DNA

SEQ ID NO: 80190 - DNA, 80 bp, synthetic construct; identical to SEQ ID NO: 46686
  source 1..80: mol_type = other DNA

SEQ ID NO: 80191 - DNA, 80 bp, synthetic construct; identical to SEQ ID NO: 46687
  source 1..80: mol_type = other DNA

SEQ ID NO: 80192 - DNA, 80 bp, synthetic construct; identical to SEQ ID NO: 46688
  source 1..80: mol_type = other DNA

SEQ ID NO: 80193 - DNA, 80 bp, synthetic construct; identical to SEQ ID NO: 15536
  source 1..80: mol_type = other DNA

SEQ ID NO: 80194 - DNA, 80 bp, synthetic construct; identical to SEQ ID NO: 46690
  source 1..80: mol_type = other DNA

SEQ ID NO: 80195 - DNA, 80 bp, synthetic construct; identical to SEQ ID NO: 46691
  source 1..80: mol_type = other DNA

SEQ ID NO: 80196 - DNA, 80 bp, synthetic construct; identical to SEQ ID NO: 15537
  source 1..80: mol_type = other DNA

SEQ ID NO: 80197 - DNA, 80 bp, synthetic construct; identical to SEQ ID NO: 46694
  source 1..80: mol_type = other DNA

SEQ ID NO: 80198 - DNA, 80 bp, synthetic construct; identical to SEQ ID NO: 46695
  source 1..80: mol_type = other DNA

SEQ ID NO: 80199 - DNA, 80 bp, synthetic construct; identical to SEQ ID NO: 46696
  source 1..80: mol_type = other DNA

SEQ ID NO: 80200 - DNA, 80 bp, synthetic construct; identical to SEQ ID NO: 15538
  source 1..80: mol_type = other DNA

SEQ ID NO: 80201 - DNA, 80 bp, synthetic construct; identical to SEQ ID NO: 46698
  source 1..80: mol_type = other DNA

SEQ ID NO: 80202 - DNA, 80 bp, synthetic construct; identical to SEQ ID NO: 46699
  source 1..80: mol_type = other DNA

SEQ ID NO: 80203 - DNA, 80 bp, synthetic construct; identical to SEQ ID NO: 46701
  source 1..80: mol_type = other DNA

SEQ ID NO: 80204 - DNA, 80 bp, synthetic construct; identical to SEQ ID NO: 15539
  source 1..80: mol_type = other DNA

SEQ ID NO: 80205 - DNA, 80 bp, synthetic construct; identical to SEQ ID NO: 46703
  source 1..80: mol_type = other DNA

SEQ ID NO: 80206 - DNA, 80 bp, synthetic construct; identical to SEQ ID NO: 46704
  source 1..80: mol_type = other DNA

SEQ ID NO: 80207 - DNA, 80 bp, synthetic construct; identical to SEQ ID NO: 15540
  source 1..80: mol_type = other DNA

SEQ ID NO: 80208 - DNA, 80 bp, synthetic construct; identical to SEQ ID NO: 46706
  source 1..80: mol_type = other DNA

SEQ ID NO: 80209 - DNA, 80 bp, synthetic construct; identical to SEQ ID NO: 46707
  source 1..80: mol_type = other DNA

SEQ ID NO: 80210 - DNA, 80 bp, synthetic construct; identical to SEQ ID NO: 46708
  source 1..80: mol_type = other DNA

SEQ ID NO: 80211 - DNA, 80 bp, synthetic construct; identical to SEQ ID NO: 46709
  source 1..80: mol_type = other DNA

SEQ ID NO: 80212 - DNA, 80 bp, synthetic construct; identical to SEQ ID NO: 15541
  source 1..80: mol_type = other DNA

SEQ ID NO: 80213 - DNA, 80 bp, synthetic construct; identical to SEQ ID NO: 46711
  source 1..80: mol_type = other DNA

SEQ ID NO: 80214 - DNA, 80 bp, synthetic construct; identical to SEQ ID NO: 46712
  source 1..80: mol_type = other DNA

SEQ ID NO: 80215 - DNA, 80 bp, synthetic construct; identical to SEQ ID NO: 15542
  source 1..80: mol_type = other DNA

SEQ ID NO: 80216 - DNA, 80 bp, synthetic construct; identical to SEQ ID NO: 46714
  source 1..80: mol_type = other DNA

SEQ ID NO: 80217 - DNA, 80 bp, synthetic construct; identical to SEQ ID NO: 46715
  source 1..80: mol_type = other DNA

SEQ ID NO: 80218 - DNA, 80 bp, synthetic construct; identical to SEQ ID NO: 46716
  source 1..80: mol_type = other DNA

SEQ ID NO: 80219 - DNA, 80 bp, synthetic construct; identical to SEQ ID NO: 15543
  source 1..80: mol_type = other DNA

SEQ ID NO: 80220 - DNA, 80 bp, synthetic construct; identical to SEQ ID NO: 46718
  source 1..80: mol_type = other DNA

SEQ ID NO: 80221 - DNA, 80 bp, synthetic construct; identical to SEQ ID NO: 46719
  source 1..80: mol_type = other DNA

SEQ ID NO: 80222 - DNA, 80 bp, synthetic construct; identical to SEQ ID NO: 46720
  source 1..80: mol_type = other DNA

SEQ ID NO: 80223 - DNA, 80 bp, synthetic construct; identical to SEQ ID NO: 46721
  source 1..80: mol_type = other DNA

SEQ ID NO: 80224 - DNA, 80 bp, synthetic construct; identical to SEQ ID NO: 46722
  source 1..80: mol_type = other DNA

SEQ ID NO: 80225 - DNA, 80 bp, synthetic construct; identical to SEQ ID NO: 15595
  source 1..80: mol_type = other DNA

SEQ ID NO: 80226 - DNA, 80 bp, synthetic construct; identical to SEQ ID NO: 46724
  source 1..80: mol_type = other DNA

SEQ ID NO: 80227 - DNA, 80 bp, synthetic construct; identical to SEQ ID NO: 46725
  source 1..80: mol_type = other DNA

SEQ ID NO: 80228 - DNA, 80 bp, synthetic construct; identical to SEQ ID NO: 46726
  source 1..80: mol_type = other DNA

SEQ ID NO: 80229 - DNA, 80 bp, synthetic construct; identical to SEQ ID NO: 15596
  source 1..80: mol_type = other DNA

SEQ ID NO: 80230 - DNA, 80 bp, synthetic construct; identical to SEQ ID NO: 46728
  source 1..80: mol_type = other DNA

SEQ ID NO: 80231 - DNA, 80 bp, synthetic construct; identical to SEQ ID NO: 46729
  source 1..80: mol_type = other DNA

SEQ ID NO: 80232 - DNA, 80 bp, synthetic construct; identical to SEQ ID NO: 46730
  source 1..80: mol_type = other DNA

SEQ ID NO: 80233 - DNA, 80 bp, synthetic construct; identical to SEQ ID NO: 15597
  source 1..80: mol_type = other DNA

SEQ ID NO: 80234 - DNA, 80 bp, synthetic construct; identical to SEQ ID NO: 46732
  source 1..80: mol_type = other DNA

SEQ ID NO: 80235 - DNA, 80 bp, synthetic construct; identical to SEQ ID NO: 46733
  source 1..80: mol_type = other DNA

SEQ ID NO: 80236 - DNA, 80 bp, synthetic construct; identical to SEQ ID NO: 15598
  source 1..80: mol_type = other DNA

SEQ ID NO: 80237 - DNA, 80 bp, synthetic construct; identical to SEQ ID NO: 46735
  source 1..80: mol_type = other DNA

SEQ ID NO: 80238 - DNA, 80 bp, synthetic construct; identical to SEQ ID NO: 46736
  source 1..80: mol_type = other DNA

SEQ ID NO: 80239 - DNA, 80 bp, synthetic construct; identical to SEQ ID NO: 46737
  source 1..80: mol_type = other DNA

SEQ ID NO: 80240 - DNA, 80 bp, synthetic construct; identical to SEQ ID NO: 15599
  source 1..80: mol_type = other DNA

SEQ ID NO: 80241 - DNA, 80 bp, synthetic construct; identical to SEQ ID NO: 46739
  source 1..80: mol_type = other DNA

SEQ ID NO: 80242 - DNA, 80 bp, synthetic construct; identical to SEQ ID NO: 46740
  source 1..80: mol_type = other DNA

SEQ ID NO: 80243 - DNA, 80 bp, synthetic construct; identical to SEQ ID NO: 46741
  source 1..80: mol_type = other DNA

SEQ ID NO: 80244 - DNA, 80 bp, synthetic construct; identical to SEQ ID NO: 15600
  source 1..80: mol_type = other DNA

SEQ ID NO: 80245 - DNA, 80 bp, synthetic construct; identical to SEQ ID NO: 46743
  source 1..80: mol_type = other DNA

SEQ ID NO: 80246 - DNA, 80 bp, synthetic construct; identical to SEQ ID NO: 46744
  source 1..80: mol_type = other DNA

SEQ ID NO: 80247 - DNA, 80 bp, synthetic construct; identical to SEQ ID NO: 46745
  source 1..80: mol_type = other DNA

SEQ ID NO: 80248 - DNA, 80 bp, synthetic construct; identical to SEQ ID NO: 46746
  source 1..80: mol_type = other DNA

SEQ ID NO: 80249 - DNA, 80 bp, synthetic construct; identical to SEQ ID NO: 46747
  source 1..80: mol_type = other DNA

SEQ ID NO: 80250 - DNA, 80 bp, synthetic construct; identical to SEQ ID NO: 46748
  source 1..80: mol_type = other DNA

SEQ ID NO: 80251 - DNA, 80 bp, synthetic construct; identical to SEQ ID NO: 46749
  source 1..80: mol_type = other DNA

SEQ ID NO: 80252 - DNA, 80 bp, synthetic construct; identical to SEQ ID NO: 15544
  source 1..80: mol_type = other DNA

SEQ ID NO: 80253 - DNA, 80 bp, synthetic construct; identical to SEQ ID NO: 46751
  source 1..80: mol_type = other DNA

SEQ ID NO: 80254 - DNA, 80 bp, synthetic construct; identical to SEQ ID NO: 46752
  source 1..80: mol_type = other DNA

SEQ ID NO: 80255 - DNA, 80 bp, synthetic construct; identical to SEQ ID NO: 15545
  source 1..80: mol_type = other DNA

SEQ ID NO: 80256 - DNA, 80 bp, synthetic construct; identical to SEQ ID NO: 46754
  source 1..80: mol_type = other DNA

SEQ ID NO: 80257 - DNA, 80 bp, synthetic construct; identical to SEQ ID NO: 46755
  source 1..80: mol_type = other DNA

SEQ ID NO: 80258 - DNA, 80 bp, synthetic construct; identical to SEQ ID NO: 46756
  source 1..80: mol_type = other DNA

SEQ ID NO: 80259 - DNA, 80 bp, synthetic construct; identical to SEQ ID NO: 15546
  source 1..80: mol_type = other DNA

SEQ ID NO: 80260 - DNA, 80 bp, synthetic construct; identical to SEQ ID NO: 46758
  source 1..80: mol_type = other DNA

SEQ ID NO: 80261 - DNA, 80 bp, synthetic construct; identical to SEQ ID NO: 46759
  source 1..80: mol_type = other DNA

SEQ ID NO: 80262 - DNA, 80 bp, synthetic construct; identical to SEQ ID NO: 46760
  source 1..80: mol_type = other DNA

SEQ ID NO: 80263 - DNA, 80 bp, synthetic construct; identical to SEQ ID NO: 46761
  source 1..80: mol_type = other DNA

SEQ ID NO: 80264 - DNA, 80 bp, synthetic construct; identical to SEQ ID NO: 15547
  source 1..80: mol_type = other DNA

SEQ ID NO: 80265 - DNA, 80 bp, synthetic construct; identical to SEQ ID NO: 46763
  source 1..80: mol_type = other DNA

SEQ ID NO: 80266 - DNA, 80 bp, synthetic construct; identical to SEQ ID NO: 46764
  source 1..80: mol_type = other DNA

SEQ ID NO: 80267 - DNA, 80 bp, synthetic construct; identical to SEQ ID NO: 46765
  source 1..80: mol_type = other DNA

SEQ ID NO: 80268 - DNA, 80 bp, synthetic construct; identical to SEQ ID NO: 15548
  source 1..80: mol_type = other DNA

SEQ ID NO: 80269 - DNA, 80 bp, synthetic construct; identical to SEQ ID NO: 46767
  source 1..80: mol_type = other DNA

SEQ ID NO: 80270 - DNA, 80 bp, synthetic construct; identical to SEQ ID NO: 15549
  source 1..80: mol_type = other DNA

SEQ ID NO: 80271 - DNA, 80 bp, synthetic construct; identical to SEQ ID NO: 46770
  source 1..80: mol_type = other DNA

SEQ ID NO: 80272 - DNA, 80 bp, synthetic construct; identical to SEQ ID NO: 46771
  source 1..80: mol_type = other DNA

SEQ ID NO: 80273 - DNA, 80 bp, synthetic construct; identical to SEQ ID NO: 46772
  source 1..80: mol_type = other DNA

SEQ ID NO: 80274 - DNA, 80 bp, synthetic construct; identical to SEQ ID NO: 15550
  source 1..80: mol_type = other DNA

SEQ ID NO: 80275 - DNA, 80 bp, synthetic construct; identical to SEQ ID NO: 46774
  source 1..80: mol_type = other DNA

SEQ ID NO: 80276 - DNA, 80 bp, synthetic construct; identical to SEQ ID NO: 46775
  source 1..80: mol_type = other DNA

SEQ ID NO: 80277 - DNA, 80 bp, synthetic construct; identical to SEQ ID NO: 46776
  source 1..80: mol_type = other DNA

SEQ ID NO: 80278 - DNA, 80 bp, synthetic construct; identical to SEQ ID NO: 15551
  source 1..80: mol_type = other DNA

SEQ ID NO: 80279 - DNA, 80 bp, synthetic construct; identical to SEQ ID NO: 46778
  source 1..80: mol_type = other DNA

SEQ ID NO: 80280 - DNA, 80 bp, synthetic construct; identical to SEQ ID NO: 46779
  source 1..80: mol_type = other DNA

SEQ ID NO: 80281 - DNA, 80 bp, synthetic construct; identical to SEQ ID NO: 46780
  source 1..80: mol_type = other DNA

SEQ ID NO: 80282 - DNA, 80 bp, synthetic construct; identical to SEQ ID NO: 15552
  source 1..80: mol_type = other DNA

SEQ ID NO: 80283 - DNA, 80 bp, synthetic construct; identical to SEQ ID NO: 46782
  source 1..80: mol_type = other DNA

SEQ ID NO: 80284 - DNA, 80 bp, synthetic construct; identical to SEQ ID NO: 46783
  source 1..80: mol_type = other DNA

SEQ ID NO: 80285 - DNA, 80 bp, synthetic construct; identical to SEQ ID NO: 46785
  source 1..80: mol_type = other DNA

SEQ ID NO: 80286 - DNA, 80 bp, synthetic construct; identical to SEQ ID NO: 15553
  source 1..80: mol_type = other DNA

SEQ ID NO: 80287 - DNA, 80 bp, synthetic construct; identical to SEQ ID NO: 46787
  source 1..80: mol_type = other DNA

SEQ ID NO: 80288 - DNA, 80 bp, synthetic construct; identical to SEQ ID NO: 46788
  source 1..80: mol_type = other DNA

SEQ ID NO: 80289 - DNA, 80 bp, synthetic construct; identical to SEQ ID NO: 15554
  source 1..80: mol_type = other DNA

SEQ ID NO: 80290 - DNA, 80 bp, synthetic construct; identical to SEQ ID NO: 46790
  source 1..80: mol_type = other DNA

SEQ ID NO: 80291 - DNA, 80 bp, synthetic construct; identical to SEQ ID NO: 46791
  source 1..80: mol_type = other DNA

SEQ ID NO: 80292 - DNA, 80 bp, synthetic construct; identical to SEQ ID NO: 46792
  source 1..80: mol_type = other DNA

SEQ ID NO: 80293 - DNA, 80 bp, synthetic construct; identical to SEQ ID NO: 46793
  source 1..80: mol_type = other DNA

SEQ ID NO: 80294 - DNA, 80 bp, synthetic construct; identical to SEQ ID NO: 15555
  source 1..80: mol_type = other DNA

SEQ ID NO: 80295 - DNA, 80 bp, synthetic construct; identical to SEQ ID NO: 46795
  source 1..80: mol_type = other DNA

SEQ ID NO: 80296 - DNA, 80 bp, synthetic construct; identical to SEQ ID NO: 46796
  source 1..80: mol_type = other DNA

SEQ ID NO: 80297 - DNA, 80 bp, synthetic construct; identical to SEQ ID NO: 46797
  source 1..80: mol_type = other DNA

SEQ ID NO: 80298 - DNA, 80 bp, synthetic construct; identical to SEQ ID NO: 15556
  source 1..80: mol_type = other DNA

SEQ ID NO: 80299 - DNA, 80 bp, synthetic construct; identical to SEQ ID NO: 46799
  source 1..80: mol_type = other DNA

SEQ ID NO: 80300 - DNA, 80 bp, synthetic construct; identical to SEQ ID NO: 46800
  source 1..80: mol_type = other DNA

SEQ ID NO: 80301 - DNA, 80 bp, synthetic construct; identical to SEQ ID NO: 46801
  source 1..80: mol_type = other DNA

SEQ ID NO: 80302 - DNA, 80 bp, synthetic construct; identical to SEQ ID NO: 46802
  source 1..80: mol_type = other DNA

SEQ ID NO: 80303 - DNA, 80 bp, synthetic construct; identical to SEQ ID NO: 15557
  source 1..80: mol_type = other DNA

SEQ ID NO: 80304 - DNA, 80 bp, synthetic construct; identical to SEQ ID NO: 46804
  source 1..80: mol_type = other DNA

SEQ ID NO: 80305 - DNA, 80 bp, synthetic construct; identical to SEQ ID NO: 46805
  source 1..80: mol_type = other DNA

SEQ ID NO: 80306 - DNA, 80 bp, synthetic construct; identical to SEQ ID NO: 15558
  source 1..80: mol_type = other DNA

SEQ ID NO: 80307 - DNA, 80 bp, synthetic construct; identical to SEQ ID NO: 46807
  source 1..80: mol_type = other DNA

SEQ ID NO: 80308 - DNA, 80 bp, synthetic construct; identical to SEQ ID NO: 46808
  source 1..80: mol_type = other DNA

SEQ ID NO: 80309 - DNA, 80 bp, synthetic construct; identical to SEQ ID NO: 46809
  source 1..80: mol_type = other DNA

SEQ ID NO: 80310 - DNA, 80 bp, synthetic construct; identical to SEQ ID NO: 46810
  source 1..80: mol_type = other DNA

SEQ ID NO: 80311 - DNA, 80 bp, synthetic construct; identical to SEQ ID NO: 15559
  source 1..80: mol_type = other DNA

SEQ ID NO: 80312 - DNA, 80 bp, synthetic construct; identical to SEQ ID NO: 46812
  source 1..80: mol_type = other DNA

SEQ ID NO: 80313 - DNA, 80 bp, synthetic construct; identical to SEQ ID NO: 46813
  source 1..80: mol_type = other DNA

SEQ ID NO: 80314 - DNA, 80 bp, synthetic construct; identical to SEQ ID NO: 15560
  source 1..80: mol_type = other DNA

SEQ ID NO: 80315 - DNA, 80 bp, synthetic construct; identical to SEQ ID NO: 46815
  source 1..80: mol_type = other DNA

SEQ ID NO: 80316 - DNA, 80 bp, synthetic construct; identical to SEQ ID NO: 46816
  source 1..80: mol_type = other DNA

SEQ ID NO: 80317 - DNA, 80 bp, synthetic construct; identical to SEQ ID NO: 46817
  source 1..80: mol_type = other DNA

SEQ ID NO: 80318 - DNA, 80 bp, synthetic construct; identical to SEQ ID NO: 46818
  source 1..80: mol_type = other DNA

SEQ ID NO: 80319 - DNA, 80 bp, synthetic construct; identical to SEQ ID NO: 15561
  source 1..80: mol_type = other DNA

SEQ ID NO: 80320 - DNA, 80 bp, synthetic construct; identical to SEQ ID NO: 46821
  source 1..80: mol_type = other DNA

SEQ ID NO: 80321 - DNA, 80 bp, synthetic construct; identical to SEQ ID NO: 15562
  source 1..80: mol_type = other DNA

SEQ ID NO: 80322 - DNA, 80 bp, synthetic construct; identical to SEQ ID NO: 46823
  source 1..80: mol_type = other DNA

SEQ ID NO: 80323 - DNA, 80 bp, synthetic construct; identical to SEQ ID NO: 46824
  source 1..80: mol_type = other DNA

SEQ ID NO: 80324 - DNA, 80 bp, synthetic construct; identical to SEQ ID NO: 46825
  source 1..80: mol_type = other DNA

SEQ ID NO: 80325 - DNA, 80 bp, synthetic construct; identical to SEQ ID NO: 15563
  source 1..80: mol_type = other DNA

SEQ ID NO: 80326 - DNA, 80 bp, synthetic construct; identical to SEQ ID NO: 46827
  source 1..80: mol_type = other DNA

SEQ ID NO: 80327 - DNA, 80 bp, synthetic construct; identical to SEQ ID NO: 46828
  source 1..80: mol_type = other DNA

SEQ ID NO: 80328 - DNA, 80 bp, synthetic construct; identical to SEQ ID NO: 46829
  source 1..80: mol_type = other DNA

SEQ ID NO: 80329 - DNA, 80 bp, synthetic construct; identical to SEQ ID NO: 15564
  source 1..80: mol_type = other DNA

SEQ ID NO: 80330 - DNA, 80 bp, synthetic construct; identical to SEQ ID NO: 46831
  source 1..80: mol_type = other DNA

SEQ ID NO: 80331 - DNA, 80 bp, synthetic construct; identical to SEQ ID NO: 46832
  source 1..80: mol_type = other DNA

SEQ ID NO: 80332 - DNA, 80 bp, synthetic construct; identical to SEQ ID NO: 46833
  source 1..80: mol_type = other DNA

SEQ ID NO: 80333 - DNA, 80 bp, synthetic construct; identical to SEQ ID NO: 15565
  source 1..80: mol_type = other DNA

SEQ ID NO: 80334 - DNA, 80 bp, synthetic construct; identical to SEQ ID NO: 46835
  source 1..80: mol_type = other DNA

SEQ ID NO: 80335 - DNA, 80 bp, synthetic construct; identical to SEQ ID NO: 46836
  source 1..80: mol_type = other DNA

SEQ ID NO: 80336 - DNA, 80 bp, synthetic construct; identical to SEQ ID NO: 46837
  source 1..80: mol_type = other DNA

SEQ ID NO: 80337 - DNA, 80 bp, synthetic construct; identical to SEQ ID NO: 46838
  source 1..80: mol_type = other DNA

SEQ ID NO: 80338 - DNA, 80 bp, synthetic construct; identical to SEQ ID NO: 15566
  source 1..80: mol_type = other DNA

SEQ ID NO: 80339 - DNA, 80 bp, synthetic construct; identical to SEQ ID NO: 46840
  source 1..80: mol_type = other DNA

SEQ ID NO: 80340 - DNA, 80 bp, synthetic construct; identical to SEQ ID NO: 46841
  source 1..80: mol_type = other DNA

SEQ ID NO: 80341 - DNA, 80 bp, synthetic construct; identical to SEQ ID NO: 46842
  source 1..80: mol_type = other DNA

SEQ ID NO: 80342 - DNA, 80 bp, synthetic construct; identical to SEQ ID NO: 15567
  source 1..80: mol_type = other DNA

SEQ ID NO: 80343 - DNA, 80 bp, synthetic construct; identical to SEQ ID NO: 46844
  source 1..80: mol_type = other DNA

SEQ ID NO: 80344 - DNA, 80 bp, synthetic construct; identical to SEQ ID NO: 46845
  source 1..80: mol_type = other DNA

SEQ ID NO: 80345 - DNA, 80 bp, synthetic construct; identical to SEQ ID NO: 15568
  source 1..80: mol_type = other DNA

SEQ ID NO: 80346 - DNA, 80 bp, synthetic construct; identical to SEQ ID NO: 46847
  source 1..80: mol_type = other DNA

SEQ ID NO: 80347 - DNA, 80 bp, synthetic construct; identical to SEQ ID NO: 46848
  source 1..80: mol_type = other DNA

SEQ ID NO: 80348 - DNA, 80 bp, synthetic construct; identical to SEQ ID NO: 46849
  source 1..80: mol_type = other DNA

SEQ ID NO: 80349 - DNA, 80 bp, synthetic construct; identical to SEQ ID NO: 46850
  source 1..80: mol_type = other DNA

SEQ ID NO: 80350 - DNA, 80 bp, synthetic construct; identical to SEQ ID NO: 15569
  source 1..80: mol_type = other DNA

SEQ ID NO: 80351 - DNA, 80 bp, synthetic construct; identical to SEQ ID NO: 46852
  source 1..80: mol_type = other DNA

SEQ ID NO: 80352 - DNA, 80 bp, synthetic construct; identical to SEQ ID NO: 46853
  source 1..80: mol_type = other DNA

SEQ ID NO: 80353 - DNA, 80 bp, synthetic construct; identical to SEQ ID NO: 46854
  source 1..80: mol_type = other DNA

SEQ ID NO: 80354 - DNA, 80 bp, synthetic construct; identical to SEQ ID NO: 15570
  source 1..80: mol_type = other DNA

SEQ ID NO: 80355 - DNA, 80 bp, synthetic construct; identical to SEQ ID NO: 46856
  source 1..80: mol_type = other DNA

SEQ ID NO: 80356 - DNA, 80 bp, synthetic construct; identical to SEQ ID NO: 46857
  source 1..80: mol_type = other DNA

SEQ ID NO: 80357 - DNA, 80 bp, synthetic construct; identical to SEQ ID NO: 46858
  source 1..80: mol_type = other DNA

SEQ ID NO: 80358 - DNA, 80 bp, synthetic construct; identical to SEQ ID NO: 15571
  source 1..80: mol_type = other DNA

SEQ ID NO: 80359 - DNA, 80 bp, synthetic construct; identical to SEQ ID NO: 46860
  source 1..80: mol_type = other DNA

SEQ ID NO: 80360 - DNA, 80 bp, synthetic construct; identical to SEQ ID NO: 46861
  source 1..80: mol_type = other DNA

SEQ ID NO: 80361 - DNA, 80 bp, synthetic construct; identical to SEQ ID NO: 15572
  source 1..80: mol_type = other DNA

SEQ ID NO: 80362 - DNA, 80 bp, synthetic construct; identical to SEQ ID NO: 46863
  source 1..80: mol_type = other DNA

SEQ ID NO: 80363 - DNA, 80 bp, synthetic construct; identical to SEQ ID NO: 46864
  source 1..80: mol_type = other DNA

SEQ ID NO: 80364 - DNA, 80 bp, synthetic construct; identical to SEQ ID NO: 46865
  source 1..80: mol_type = other DNA

SEQ ID NO: 80365 - DNA, 80 bp, synthetic construct; identical to SEQ ID NO: 46866
  source 1..80: mol_type = other DNA

SEQ ID NO: 80366 - DNA, 80 bp, synthetic construct; identical to SEQ ID NO: 15573
  source 1..80: mol_type = other DNA

SEQ ID NO: 80367 - DNA, 80 bp, synthetic construct; identical to SEQ ID NO: 46868
  source 1..80: mol_type = other DNA

SEQ ID NO: 80368 - DNA, 80 bp, synthetic construct; identical to SEQ ID NO: 46869
  source 1..80: mol_type = other DNA

SEQ ID NO: 80369 - DNA, 80 bp, synthetic construct; identical to SEQ ID NO: 46870
  source 1..80: mol_type = other DNA

SEQ ID NO: 80370 - DNA, 80 bp, synthetic construct; identical to SEQ ID NO: 15574
  source 1..80: mol_type = other DNA

SEQ ID NO: 80371 - DNA, 80 bp, synthetic construct; identical to SEQ ID NO: 46872
  source 1..80: mol_type = other DNA

SEQ ID NO: 80372 - DNA, 80 bp, synthetic construct; identical to SEQ ID NO: 46873
  source 1..80: mol_type = other DNA

SEQ ID NO: 80373 - DNA, 80 bp, synthetic construct; identical to SEQ ID NO: 15575
  source 1..80: mol_type = other DNA

SEQ ID NO: 80374 - DNA, 80 bp, synthetic construct; identical to SEQ ID NO: 46875
  source 1..80: mol_type = other DNA

SEQ ID NO: 80375 - DNA, 80 bp, synthetic construct; identical to SEQ ID NO: 46876
  source 1..80: mol_type = other DNA

SEQ ID NO: 80376 - DNA, 80 bp, synthetic construct; identical to SEQ ID NO: 46877
  source 1..80: mol_type = other DNA

SEQ ID NO: 80377 - DNA, 80 bp, synthetic construct; identical to SEQ ID NO: 15576
  source 1..80: mol_type = other DNA

SEQ ID NO: 80378 - DNA, 80 bp, synthetic construct; identical to SEQ ID NO: 46879
  source 1..80: mol_type = other DNA

SEQ ID NO: 80379 - DNA, 80 bp, synthetic construct; identical to SEQ ID NO: 46880
  source 1..80: mol_type = other DNA

SEQ ID NO: 80380 - DNA, 80 bp, synthetic construct; identical to SEQ ID NO: 46881
  source 1..80: mol_type = other DNA

SEQ ID NO: 80381 - DNA, 80 bp, synthetic construct; identical to SEQ ID NO: 15577
  source 1..80: mol_type = other DNA

SEQ ID NO: 80382 - DNA, 80 bp, synthetic construct; identical to SEQ ID NO: 46884
  source 1..80: mol_type = other DNA

SEQ ID NO: 80383 - DNA, 80 bp, synthetic construct; identical to SEQ ID NO: 46885
  source 1..80: mol_type = other DNA

SEQ ID NO: 80384 - DNA, 80 bp, synthetic construct; identical to SEQ ID NO: 15578
  source 1..80: mol_type = other DNA

SEQ ID NO: 80385 - DNA, 80 bp, synthetic construct; identical to SEQ ID NO: 46887
  source 1..80: mol_type = other DNA

SEQ ID NO: 80386 - DNA, 80 bp, synthetic construct; identical to SEQ ID NO: 46888
  source 1..80: mol_type = other DNA

SEQ ID NO: 80387 - DNA, 80 bp, synthetic construct; identical to SEQ ID NO: 46889
  source 1..80: mol_type = other DNA

SEQ ID NO: 80388 - DNA, 80 bp, synthetic construct; identical to SEQ ID NO: 46890
  source 1..80: mol_type = other DNA

SEQ ID NO: 80389 - DNA, 80 bp, synthetic construct; identical to SEQ ID NO: 15579
  source 1..80: mol_type = other DNA

SEQ ID NO: 80390 - DNA, 80 bp, synthetic construct; identical to SEQ ID NO: 46892
  source 1..80: mol_type = other DNA

SEQ ID NO: 80391 - DNA, 80 bp, synthetic construct; identical to SEQ ID NO: 46893
  source 1..80: mol_type = other DNA

SEQ ID NO: 80392 - DNA, 80 bp, synthetic construct; identical to SEQ ID NO: 46894
  source 1..80: mol_type = other DNA

SEQ ID NO: 80393 - DNA, 80 bp, synthetic construct; identical to SEQ ID NO: 15580
  source 1..80: mol_type = other DNA

SEQ ID NO: 80394 - DNA, 80 bp, synthetic construct; identical to SEQ ID NO: 46896
  source 1..80: mol_type = other DNA

SEQ ID NO: 80395 - DNA, 80 bp, synthetic construct; identical to SEQ ID NO: 46897
  source 1..80: mol_type = other DNA

SEQ ID NO: 80396 - DNA, 80 bp, synthetic construct; identical to SEQ ID NO: 46898
  source 1..80: mol_type = other DNA

SEQ ID NO: 80397 - DNA, 80 bp, synthetic construct; identical to SEQ ID NO: 15581
  source 1..80: mol_type = other DNA

SEQ ID NO: 80398 - DNA, 80 bp, synthetic construct; identical to SEQ ID NO: 46900
  source 1..80: mol_type = other DNA

SEQ ID NO: 80399 - DNA, 80 bp, synthetic construct; identical to SEQ ID NO: 46901
  source 1..80: mol_type = other DNA

SEQ ID NO: 80400 - DNA, 80 bp, synthetic construct; identical to SEQ ID NO: 15582
  source 1..80: mol_type = other DNA

SEQ ID NO: 80401 - DNA, 80 bp, synthetic construct; identical to SEQ ID NO: 46903
  source 1..80: mol_type = other DNA

SEQ ID NO: 80402 - DNA, 80 bp, synthetic construct; identical to SEQ ID NO: 46904
  source 1..80: mol_type = other DNA

SEQ ID NO: 80403 - DNA, 80 bp, synthetic construct; identical to SEQ ID NO: 46905
  source 1..80: mol_type = other DNA

SEQ ID NO: 80404 - DNA, 80 bp, synthetic construct; identical to SEQ ID NO: 15583
  source 1..80: mol_type = other DNA

SEQ ID NO: 80405 - DNA, 80 bp, synthetic construct; identical to SEQ ID NO: 46908
  source 1..80: mol_type = other DNA

SEQ ID NO: 80406 - DNA, 80 bp, synthetic construct; identical to SEQ ID NO: 46909
  source 1..80: mol_type = other DNA

SEQ ID NO: 80407 - DNA, 80 bp, synthetic construct; identical to SEQ ID NO: 46910
  source 1..80: mol_type = other DNA

SEQ ID NO: 80408 - DNA, 80 bp, synthetic construct; identical to SEQ ID NO: 15584
  source 1..80: mol_type = other DNA

SEQ ID NO: 80409 - DNA, 80 bp, synthetic construct; identical to SEQ ID NO: 46912
  source 1..80: mol_type = other DNA

SEQ ID NO: 80410 - DNA, 80 bp, synthetic construct; identical to SEQ ID NO: 46913
  source 1..80: mol_type = other DNA

SEQ ID NO: 80411 - DNA, 80 bp, synthetic construct; identical to SEQ ID NO: 46914
  source 1..80: mol_type = other DNA

SEQ ID NO: 80412 - DNA, 80 bp, synthetic construct; identical to SEQ ID NO: 15585
  source 1..80: mol_type = other DNA

SEQ ID NO: 80413 - DNA, 80 bp, synthetic construct; identical to SEQ ID NO: 46916
  source 1..80: mol_type = other DNA

SEQ ID NO: 80414 - DNA, 80 bp, synthetic construct; identical to SEQ ID NO: 46917
  source 1..80: mol_type = other DNA

SEQ ID NO: 80415 - DNA, 80 bp, synthetic construct; identical to SEQ ID NO: 46918
  source 1..80: mol_type = other DNA

SEQ ID NO: 80416 - DNA, 80 bp, synthetic construct; identical to SEQ ID NO: 15586
  source 1..80: mol_type = other DNA

SEQ ID NO: 80417 - DNA, 80 bp, synthetic construct; identical to SEQ ID NO: 46920
  source 1..80: mol_type = other DNA

SEQ ID NO: 80418 - DNA, 80 bp, synthetic construct; identical to SEQ ID NO: 46921
  source 1..80: mol_type = other DNA

SEQ ID NO: 80419 - DNA, 80 bp, synthetic construct; identical to SEQ ID NO: 46922
  source 1..80: mol_type = other DNA

SEQ ID NO: 80420 - DNA, 80 bp, synthetic construct; identical to SEQ ID NO: 15587
  source 1..80: mol_type = other DNA

SEQ ID NO: 80421 - DNA, 80 bp, synthetic construct; identical to SEQ ID NO: 46924
  source 1..80: mol_type = other DNA

SEQ ID NO: 80422 - DNA, 80 bp, synthetic construct; identical to SEQ ID NO: 46925
  source 1..80: mol_type = other DNA

SEQ ID NO: 80423 - DNA, 80 bp, synthetic construct; identical to SEQ ID NO: 15588
  source 1..80: mol_type = other DNA

SEQ ID NO: 80424 - DNA, 80 bp, synthetic construct; identical to SEQ ID NO: 46927
  source 1..80: mol_type = other DNA

SEQ ID NO: 80425 - DNA, 80 bp, synthetic construct; identical to SEQ ID NO: 46928
  source 1..80: mol_type = other DNA

SEQ ID NO: 80426 - DNA, 80 bp, synthetic construct; identical to SEQ ID NO: 46929
  source 1..80: mol_type = other DNA

SEQ ID NO: 80427 - DNA, 80 bp, synthetic construct; identical to SEQ ID NO: 15589
  source 1..80: mol_type = other DNA

SEQ ID NO: 80428 - DNA, 80 bp, synthetic construct; identical to SEQ ID NO: 46931
  source 1..80: mol_type = other DNA

SEQ ID NO: 80429 - DNA, 80 bp, synthetic construct; identical to SEQ ID NO: 46932
  source 1..80: mol_type = other DNA

SEQ ID NO: 80430 - DNA, 80 bp, synthetic construct; identical to SEQ ID NO: 46933
  source 1..80: mol_type = other DNA

SEQ ID NO: 80431 - DNA, 80 bp, synthetic construct; identical to SEQ ID NO: 15590
  source 1..80: mol_type = other DNA

SEQ ID NO: 80432 - DNA, 80 bp, synthetic construct; identical to SEQ ID NO: 46936
  source 1..80: mol_type = other DNA

SEQ ID NO: 80433 - DNA, 80 bp, synthetic construct; identical to SEQ ID NO: 46937
  source 1..80: mol_type = other DNA

SEQ ID NO: 80434 - DNA, 80 bp, synthetic construct; identical to SEQ ID NO: 15591
  source 1..80: mol_type = other DNA

SEQ ID NO: 80435 - DNA, 80 bp, synthetic construct; identical to SEQ ID NO: 46939
  source 1..80: mol_type = other DNA

SEQ ID NO: 80436 - DNA, 80 bp, synthetic construct; identical to SEQ ID NO: 46940
  source 1..80: mol_type = other DNA

SEQ ID NO: 80437 - DNA, 80 bp, synthetic construct; identical to SEQ ID NO: 46941
  source 1..80: mol_type = other DNA

SEQ ID NO: 80438 - DNA, 80 bp, synthetic construct; identical to SEQ ID NO: 46942
  source 1..80: mol_type = other DNA

SEQ ID NO: 80439 - DNA, 80 bp, synthetic construct; identical to SEQ ID NO: 15592
  source 1..80: mol_type = other DNA

SEQ ID NO: 80440 - DNA, 80 bp, synthetic construct; identical to SEQ ID NO: 46944
  source 1..80: mol_type = other DNA

SEQ ID NO: 80441 - DNA, 80 bp, synthetic construct; identical to SEQ ID NO: 46945
  source 1..80: mol_type = other DNA

SEQ ID NO: 80442 - DNA, 80 bp, synthetic construct; identical to SEQ ID NO: 46946
  source 1..80: mol_type = other DNA

SEQ ID NO: 80443 - DNA, 80 bp, synthetic construct; identical to SEQ ID NO: 15593
  source 1..80: mol_type = other DNA

SEQ ID NO: 80444 - DNA, 80 bp, synthetic construct; identical to SEQ ID NO: 46948
  source 1..80: mol_type = other DNA

SEQ ID NO: 80445 - DNA, 80 bp, synthetic construct; identical to SEQ ID NO: 46949
  source 1..80: mol_type = other DNA

SEQ ID NO: 80446 - DNA, 80 bp, synthetic construct; identical to SEQ ID NO: 46950
  source 1..80: mol_type = other DNA

SEQ ID NO: 80447 - DNA, 80 bp, synthetic construct; identical to SEQ ID NO: 15594
  source 1..80: mol_type = other DNA

SEQ ID NO: 80448 - DNA, 80 bp, synthetic construct; identical to SEQ ID NO: 46952
  source 1..80: mol_type = other DNA

SEQ ID NO: 80449 - DNA, 80 bp, synthetic construct; identical to SEQ ID NO: 46953
  source 1..80: mol_type = other DNA

SEQ ID NO: 80450 - DNA, 80 bp, synthetic construct; identical to SEQ ID NO: 46954
  source 1..80: mol_type = other DNA

SEQ ID NO: 80451 - DNA, 80 bp, synthetic construct; identical to SEQ ID NO: 46955
  source 1..80: mol_type = other DNA

SEQ ID NO: 80452 - DNA, 80 bp, synthetic construct; identical to SEQ ID NO: 46956
  source 1..80: mol_type = other DNA

SEQ ID NO: 80453 - DNA, 80 bp, synthetic construct; identical to SEQ ID NO: 15601
  source 1..80: mol_type = other DNA

SEQ ID NO: 80454 - DNA, 80 bp, synthetic construct; identical to SEQ ID NO: 15602
  source 1..80: mol_type = other DNA

SEQ ID NO: 80455 - DNA, 80 bp, synthetic construct; identical to SEQ ID NO: 46961
  source 1..80: mol_type = other DNA

SEQ ID NO: 80456 - DNA, 80 bp, synthetic construct; identical to SEQ ID NO: 46962
  source 1..80: mol_type = other DNA

SEQ ID NO: 80457 - DNA, 80 bp, synthetic construct; identical to SEQ ID NO: 46963
  source 1..80: mol_type = other DNA

SEQ ID NO: 80458 - DNA, 80 bp, synthetic construct; identical to SEQ ID NO: 15603
  source 1..80: mol_type = other DNA

SEQ ID NO: 80459 - DNA, 80 bp, synthetic construct; identical to SEQ ID NO: 46966
  source 1..80: mol_type = other DNA

SEQ ID NO: 80460 - DNA, 80 bp, synthetic construct; identical to SEQ ID NO: 46967
  source 1..80: mol_type = other DNA

SEQ ID NO: 80461 - DNA, 80 bp, synthetic construct; identical to SEQ ID NO: 46968
  source 1..80: mol_type = other DNA

SEQ ID NO: 80462 - DNA, 80 bp, synthetic construct; identical to SEQ ID NO: 15604
  source 1..80: mol_type = other DNA

SEQ ID NO: 80463 - DNA, 80 bp, synthetic construct; identical to SEQ ID NO: 46970
  source 1..80: mol_type = other DNA

SEQ ID NO: 80464 - DNA, 80 bp, synthetic construct; identical to SEQ ID NO: 46971
  source 1..80: mol_type = other DNA

SEQ ID NO: 80465 - DNA, 80 bp, synthetic construct; identical to SEQ ID NO: 15605
  source 1..80: mol_type = other DNA

SEQ ID NO: 80466 - DNA, 80 bp, synthetic construct; identical to SEQ ID NO: 46973
  source 1..80: mol_type = other DNA

SEQ ID NO: 80467 - DNA, 80 bp, synthetic construct; identical to SEQ ID NO: 46974
  source 1..80: mol_type = other DNA

SEQ ID NO: 80468 - DNA, 80 bp, synthetic construct; identical to SEQ ID NO: 46975
  source 1..80: mol_type = other DNA

SEQ ID NO: 80469 - DNA, 80 bp, synthetic construct; identical to SEQ ID NO: 46976
  source 1..80: mol_type = other DNA

SEQ ID NO: 80470 - DNA, 80 bp, synthetic construct; identical to SEQ ID NO: 15606
  source 1..80: mol_type = other DNA

SEQ ID NO: 80471 - DNA, 80 bp, synthetic construct; identical to SEQ ID NO: 46978
  source 1..80: mol_type = other DNA

SEQ ID NO: 80472 - DNA, 80 bp, synthetic construct; identical to SEQ ID NO: 46979
  source 1..80: mol_type = other DNA

SEQ ID NO: 80473 - DNA, 80 bp, synthetic construct; identical to SEQ ID NO: 15607
  source 1..80: mol_type = other DNA

SEQ ID NO: 80474 - DNA, 80 bp, synthetic construct; identical to SEQ ID NO: 46982
  source 1..80: mol_type = other DNA

SEQ ID NO: 80475 - DNA, 80 bp, synthetic construct; identical to SEQ ID NO: 46983
  source 1..80: mol_type = other DNA

SEQ ID NO: 80476 - DNA, 80 bp, synthetic construct; identical to SEQ ID NO: 46984
  source 1..80: mol_type = other DNA

SEQ ID NO: 80477 - DNA, 80 bp, synthetic construct; identical to SEQ ID NO: 15608
  source 1..80: mol_type = other DNA

SEQ ID NO: 80478 - DNA, 80 bp, synthetic construct; identical to SEQ ID NO: 46986
  source 1..80: mol_type = other DNA

SEQ ID NO: 80479 - DNA, 80 bp, synthetic construct; identical to SEQ ID NO: 46987
  source 1..80: mol_type = other DNA

SEQ ID NO: 80480 - DNA, 80 bp, synthetic construct; identical to SEQ ID NO: 15609
  source 1..80: mol_type = other DNA

SEQ ID NO: 80481 - DNA, 80 bp, synthetic construct; identical to SEQ ID NO: 46989
  source 1..80: mol_type = other DNA

SEQ ID NO: 80482 - DNA, 80 bp, synthetic construct; identical to SEQ ID NO: 46990
  source 1..80: mol_type = other DNA

SEQ ID NO: 80483 - DNA, 80 bp, synthetic construct; identical to SEQ ID NO: 15610
  source 1..80: mol_type = other DNA

SEQ ID NO: 80484 - DNA, 80 bp, synthetic construct; identical to SEQ ID NO: 46992
  source 1..80: mol_type = other DNA

SEQ ID NO: 80485 - DNA, 80 bp, synthetic construct; identical to SEQ ID NO: 46993
  source 1..80: mol_type = other DNA

SEQ ID NO: 80486 - DNA, 80 bp, synthetic construct; identical to SEQ ID NO: 46994
  source 1..80: mol_type = other DNA

SEQ ID NO: 80487 - DNA, 80 bp, synthetic construct; identical to SEQ ID NO: 15611
  source 1..80: mol_type = other DNA

SEQ ID NO: 80488 - DNA, 80 bp, synthetic construct; identical to SEQ ID NO: 46996
  source 1..80: mol_type = other DNA

SEQ ID NO: 80489 - DNA, 80 bp, synthetic construct; identical to SEQ ID NO: 46997
  source 1..80: mol_type = other DNA

SEQ ID NO: 80490 - DNA, 80 bp, synthetic construct; identical to SEQ ID NO: 46998
  source 1..80: mol_type = other DNA

SEQ ID NO: 80491 - DNA, 80 bp, synthetic construct; identical to SEQ ID NO: 46999
  source 1..80: mol_type = other DNA

SEQ ID NO: 80492 - DNA, 80 bp, synthetic construct; identical to SEQ ID NO: 15612
  source 1..80: mol_type = other DNA

SEQ ID NO: 80493 - DNA, 80 bp, synthetic construct; identical to SEQ ID NO: 47001
  source 1..80: mol_type = other DNA

SEQ ID NO: 80494 - DNA, 80 bp, synthetic construct; identical to SEQ ID NO: 47002
  source 1..80: mol_type = other DNA

SEQ ID NO: 80495 - DNA, 80 bp, synthetic construct; identical to SEQ ID NO: 15613
  source 1..80: mol_type = other DNA

SEQ ID NO: 80496 - DNA, 80 bp, synthetic construct; identical to SEQ ID NO: 47004
  source 1..80: mol_type = other DNA

SEQ ID NO: 80497 - DNA, 80 bp, synthetic construct; identical to SEQ ID NO: 47005
  source 1..80: mol_type = other DNA

SEQ ID NO: 80498 - DNA, 80 bp, synthetic construct; identical to SEQ ID NO: 47006
  source 1..80: mol_type = other DNA

SEQ ID NO: 80499 - DNA, 80 bp, synthetic construct; identical to SEQ ID NO: 47007
  source 1..80: mol_type = other DNA

SEQ ID NO: 80500 - DNA, 80 bp, synthetic construct; identical to SEQ ID NO: 15614
  source 1..80: mol_type = other DNA

SEQ ID NO: 80501 - DNA, 80 bp, synthetic construct; identical to SEQ ID NO: 47009
  source 1..80: mol_type = other DNA

SEQ ID NO: 80502 - DNA, 80 bp, synthetic construct; identical to SEQ ID NO: 47010
  source 1..80: mol_type = other DNA

SEQ ID NO: 80503 - DNA, 80 bp, synthetic construct; identical to SEQ ID NO: 15615
  source 1..80: mol_type = other DNA

SEQ ID NO: 80504 - DNA, 80 bp, synthetic construct; identical to SEQ ID NO: 47012
  source 1..80: mol_type = other DNA

SEQ ID NO: 80505 - DNA, 80 bp, synthetic construct; identical to SEQ ID NO: 47013
  source 1..80: mol_type = other DNA

SEQ ID NO: 80506 - DNA, 80 bp, synthetic construct; identical to SEQ ID NO: 47014
  source 1..80: mol_type = other DNA

SEQ ID NO: 80507 - DNA, 80 bp, synthetic construct; identical to SEQ ID NO: 15616
  source 1..80: mol_type = other DNA

SEQ ID NO: 80508 - DNA, 80 bp, synthetic construct; identical to SEQ ID NO: 47016
  source 1..80: mol_type = other DNA

SEQ ID NO: 80509 - DNA, 80 bp, synthetic construct; identical to SEQ ID NO: 47017
  source 1..80: mol_type = other DNA

SEQ ID NO: 80510 - DNA, 80 bp, synthetic construct; identical to SEQ ID NO: 47018
  source 1..80: mol_type = other DNA

SEQ ID NO: 80511 - DNA, 80 bp, synthetic construct; identical to SEQ ID NO: 47019
  source 1..80: mol_type = other DNA

SEQ ID NO: 80512 - DNA, 80 bp, synthetic construct; identical to SEQ ID NO: 15617
  source 1..80: mol_type = other DNA

SEQ ID NO: 80513 - DNA, 80 bp, synthetic construct; identical to SEQ ID NO: 47021
  source 1..80: mol_type = other DNA

SEQ ID NO: 80514 - DNA, 80 bp, synthetic construct; identical to SEQ ID NO: 47022
  source 1..80: mol_type = other DNA

SEQ ID NO: 80515 - DNA, 80 bp, synthetic construct; identical to SEQ ID NO: 47023
  source 1..80: mol_type = other DNA

SEQ ID NO: 80516 - DNA, 80 bp, synthetic construct; identical to SEQ ID NO: 15618
  source 1..80: mol_type = other DNA

SEQ ID NO: 80517 - DNA, 80 bp, synthetic construct; identical to SEQ ID NO: 47026
  source 1..80: mol_type = other DNA

SEQ ID NO: 80518 - DNA, 80 bp, synthetic construct; identical to SEQ ID NO: 47027
  source 1..80: mol_type = other DNA

SEQ ID NO: 80519 - DNA, 80 bp, synthetic construct; identical to SEQ ID NO: 15619
  source 1..80: mol_type = other DNA

SEQ ID NO: 80520 - DNA, 80 bp, synthetic construct; identical to SEQ ID NO: 47029
  source 1..80: mol_type = other DNA

SEQ ID NO: 80521 - DNA, 80 bp, synthetic construct; identical to SEQ ID NO: 47030
  source 1..80: mol_type = other DNA

SEQ ID NO: 80522 - DNA, 80 bp, synthetic construct; identical to SEQ ID NO: 47031
  source 1..80: mol_type = other DNA

SEQ ID NO: 80523 - DNA, 80 bp, synthetic construct; identical to SEQ ID NO: 15620
  source 1..80: mol_type = other DNA

SEQ ID NO: 80524 - DNA, 80 bp, synthetic construct; identical to SEQ ID NO: 47033
  source 1..80: mol_type = other DNA

SEQ ID NO: 80525 - DNA, 80 bp, synthetic construct; identical to SEQ ID NO: 47034
  source 1..80: mol_type = other DNA

SEQ ID NO: 80526 - DNA, 80 bp, synthetic construct; identical to SEQ ID NO: 47035
  source 1..80: mol_type = other DNA

SEQ ID NO: 80527 - DNA, 80 bp, synthetic construct; identical to SEQ ID NO: 47036
  source 1..80: mol_type = other DNA

SEQ ID NO: 80528 - DNA, 80 bp, synthetic construct; identical to SEQ ID NO: 15621
  source 1..80: mol_type = other DNA

SEQ ID NO: 80529 - DNA, 80 bp, synthetic construct; identical to SEQ ID NO: 47038
  source 1..80: mol_type = other DNA

SEQ ID NO: 80530 - DNA, 80 bp, synthetic construct; identical to SEQ ID NO: 47039
  source 1..80: mol_type = other DNA

SEQ ID NO: 80531 - DNA, 80 bp, synthetic construct; identical to SEQ ID NO: 15622
  source 1..80: mol_type = other DNA

SEQ ID NO: 80532 - DNA, 80 bp, synthetic construct; identical to SEQ ID NO: 47041
  source 1..80: mol_type = other DNA

SEQ ID NO: 80533 - DNA, 80 bp, synthetic construct; identical to SEQ ID NO: 47042
  source 1..80: mol_type = other DNA

SEQ ID NO: 80534 - DNA, 80 bp, synthetic construct; identical to SEQ ID NO: 47043
  source 1..80: mol_type = other DNA

SEQ ID NO: 80535 - DNA, 80 bp, synthetic construct; identical to SEQ ID NO: 15623
  source 1..80: mol_type = other DNA

SEQ ID NO: 80536 - DNA, 80 bp, synthetic construct; identical to SEQ ID NO: 47045
  source 1..80: mol_type = other DNA

SEQ ID NO: 80537 - DNA, 80 bp, synthetic construct; identical to SEQ ID NO: 47046
  source 1..80: mol_type = other DNA

SEQ ID NO: 80538 - DNA, 80 bp, synthetic construct; identical to SEQ ID NO: 47047
  source 1..80: mol_type = other DNA

SEQ ID NO: 80539 - DNA, 80 bp, synthetic construct; identical to SEQ ID NO: 47048
  source 1..80: mol_type = other DNA

SEQ ID NO: 80540 - DNA, 80 bp, synthetic construct; identical to SEQ ID NO: 15624
  source 1..80: mol_type = other DNA

SEQ ID NO: 80541 - DNA, 80 bp, synthetic construct; identical to SEQ ID NO: 47050
  source 1..80: mol_type = other DNA

SEQ ID NO: 80542 - DNA, 80 bp, synthetic construct; identical to SEQ ID NO: 47051
  source 1..80: mol_type = other DNA

SEQ ID NO: 80543 - DNA, 80 bp, synthetic construct; identical to SEQ ID NO: 15625
  source 1..80: mol_type = other DNA

SEQ ID NO: 80544 - DNA, 80 bp, synthetic construct; identical to SEQ ID NO: 47053
  source 1..80: mol_type = other DNA

SEQ ID NO: 80545 - DNA, 80 bp, synthetic construct; identical to SEQ ID NO: 47054
  source 1..80: mol_type = other DNA

SEQ ID NO: 80546 - DNA, 80 bp, synthetic construct; identical to SEQ ID NO: 15626
  source 1..80: mol_type = other DNA

SEQ ID NO: 80547 - DNA, 80 bp, synthetic construct; identical to SEQ ID NO: 47057
  source 1..80: mol_type = other DNA

SEQ ID NO: 80548 - DNA, 80 bp, synthetic construct; identical to SEQ ID NO: 47058
  source 1..80: mol_type = other DNA

SEQ ID NO: 80549 - DNA, 80 bp, synthetic construct; identical to SEQ ID NO: 15627
  source 1..80: mol_type = other DNA

SEQ ID NO: 80550 - DNA, 80 bp, synthetic construct; identical to SEQ ID NO: 47062
  source 1..80: mol_type = other DNA

SEQ ID NO: 80551 - DNA, 80 bp, synthetic construct; identical to SEQ ID NO: 47063
  source 1..80: mol_type = other DNA

SEQ ID NO: 80552 - DNA, 80 bp, synthetic construct; identical to SEQ ID NO: 15628
  source 1..80: mol_type = other DNA

SEQ ID NO: 80553 - DNA, 80 bp, synthetic construct; identical to SEQ ID NO: 47065
  source 1..80: mol_type = other DNA

SEQ ID NO: 80554 - DNA, 80 bp, synthetic construct; identical to SEQ ID NO: 47066
  source 1..80: mol_type = other DNA

SEQ ID NO: 80555 - DNA, 80 bp, synthetic construct; identical to SEQ ID NO: 47067
  source 1..80: mol_type = other DNA

SEQ ID NO: 80556 - DNA, 80 bp, synthetic construct; identical to SEQ ID NO: 47068
  source 1..80: mol_type = other DNA

SEQ ID NO: 80557 - DNA, 80 bp, synthetic construct; identical to SEQ ID NO: 15629
  source 1..80: mol_type = other DNA

SEQ ID NO: 80558 - DNA, 80 bp, synthetic construct; identical to SEQ ID NO: 47070
  source 1..80: mol_type = other DNA

SEQ ID NO: 80559 - DNA, 80 bp, synthetic construct; identical to SEQ ID NO: 47072
  source 1..80: mol_type = other DNA

SEQ ID NO: 80560 - DNA, 80 bp, synthetic construct; identical to SEQ ID NO: 15630
  source 1..80: mol_type = other DNA

SEQ ID NO: 80561 - DNA, 80 bp, synthetic construct; identical to SEQ ID NO: 47074
  source 1..80: mol_type = other DNA

SEQ ID NO: 80562 - DNA, 80 bp, synthetic construct; identical to SEQ ID NO: 47075
  source 1..80: mol_type = other DNA

SEQ ID NO: 80563 - DNA, 80 bp, synthetic construct; identical to SEQ ID NO: 47076
  source 1..80: mol_type = other DNA

SEQ ID NO: 80564 - DNA, 80 bp, synthetic construct; identical to SEQ ID NO: 15631
  source 1..80: mol_type = other DNA

SEQ ID NO: 80565 - DNA, 80 bp, synthetic construct; identical to SEQ ID NO: 47078
  source 1..80: mol_type = other DNA

SEQ ID NO: 80566 - DNA, 80 bp, synthetic construct; identical to SEQ ID NO: 47079
  source 1..80: mol_type = other DNA

SEQ ID NO: 80567 - DNA, 80 bp, synthetic construct; identical to SEQ ID NO: 15632
  source 1..80: mol_type = other DNA

SEQ ID NO: 80568 - DNA, 80 bp, synthetic construct; identical to SEQ ID NO: 47081
  source 1..80: mol_type = other DNA

SEQ ID NO: 80569 - DNA, 80 bp, synthetic construct; identical to SEQ ID NO: 47082
  source 1..80: mol_type = other DNA

SEQ ID NO: 80570 - DNA, 80 bp, synthetic construct; identical to SEQ ID NO: 47083
  source 1..80: mol_type = other DNA

SEQ ID NO: 80571 - DNA, 80 bp, synthetic construct; identical to SEQ ID NO: 47084
  source 1..80: mol_type = other DNA

SEQ ID NO: 80572 - DNA, 80 bp, synthetic construct; identical to SEQ ID NO: 15633
  source 1..80: mol_type = other DNA

SEQ ID NO: 80573 - DNA, 80 bp, synthetic construct; identical to SEQ ID NO: 47086
  source 1..80: mol_type = other DNA

SEQ ID NO: 80574 - DNA, 80 bp, synthetic construct; identical to SEQ ID NO: 47087
  source 1..80: mol_type = other DNA

SEQ ID NO: 80575 - DNA, 80 bp, synthetic construct; identical to SEQ ID NO: 15634
  source 1..80: mol_type = other DNA

SEQ ID NO: 80576 - DNA, 80 bp, synthetic construct; identical to SEQ ID NO: 47089
  source 1..80: mol_type = other DNA

SEQ ID NO: 80577 - DNA, 80 bp, synthetic construct; identical to SEQ ID NO: 47090
  source 1..80: mol_type = other DNA

SEQ ID NO: 80578 - DNA, 80 bp, synthetic construct; identical to SEQ ID NO: 47091
  source 1..80: mol_type = other DNA

SEQ ID NO: 80579 - DNA, 80 bp, synthetic construct; identical to SEQ ID NO: 15635
  source 1..80: mol_type = other DNA

SEQ ID NO: 80580 - DNA, 80 bp, synthetic construct; identical to SEQ ID NO: 47094
  source 1..80: mol_type = other DNA

SEQ ID NO: 80581 - DNA, 80 bp, synthetic construct; identical to SEQ ID NO: 47095
  source 1..80: mol_type = other DNA

SEQ ID NO: 80582 - DNA, 80 bp, synthetic construct; identical to SEQ ID NO: 47096
  source 1..80: mol_type = other DNA

SEQ ID NO: 80583 - DNA, 80 bp, synthetic construct; identical to SEQ ID NO: 15636
  source 1..80: mol_type = other DNA

SEQ ID NO: 80584 - DNA, 80 bp, synthetic construct; identical to SEQ ID NO: 47098
  source 1..80: mol_type = other DNA

SEQ ID NO: 80585 - DNA, 80 bp, synthetic construct; identical to SEQ ID NO: 47099
  source 1..80: mol_type = other DNA

SEQ ID NO: 80586 - DNA, 80 bp, synthetic construct; identical to SEQ ID NO: 15637
  source 1..80: mol_type = other DNA

SEQ ID NO: 80587 - DNA, 80 bp, synthetic construct; identical to SEQ ID NO: 47102
  source 1..80: mol_type = other DNA

SEQ ID NO: 80588 - DNA, 80 bp, synthetic construct; identical to SEQ ID NO: 47103
  source 1..80: mol_type = other DNA

SEQ ID NO: 80589 - DNA, 80 bp, synthetic construct; identical to SEQ ID NO: 15638
  source 1..80: mol_type = other DNA

SEQ ID NO: 80590 - DNA, 80 bp, synthetic construct; identical to SEQ ID NO: 47105
  source 1..80: mol_type = other DNA

SEQ ID NO: 80591 - DNA, 80 bp, synthetic construct; identical to SEQ ID NO: 47107
  source 1..80: mol_type = other DNA

SEQ ID NO: 80592 - DNA, 80 bp, synthetic construct; identical to SEQ ID NO: 15639
  source 1..80: mol_type = other DNA

SEQ ID NO: 80593 - DNA, 80 bp, synthetic construct; identical to SEQ ID NO: 47109
  source 1..80: mol_type = other DNA

SEQ ID NO: 80594 - DNA, 80 bp, synthetic construct; identical to SEQ ID NO: 47110
  source 1..80: mol_type = other DNA

SEQ ID NO: 80595 - DNA, 80 bp, synthetic construct; identical to SEQ ID NO: 47111
  source 1..80: mol_type = other DNA

SEQ ID NO: 80596 - DNA, 80 bp, synthetic construct; identical to SEQ ID NO: 47112
  source 1..80: mol_type = other DNA

SEQ ID NO: 80597 - DNA, 80 bp, synthetic construct; identical to SEQ ID NO: 15640
  source 1..80: mol_type = other DNA

SEQ ID NO: 80598 - DNA, 80 bp, synthetic construct; identical to SEQ ID NO: 47114
  source 1..80: mol_type = other DNA

SEQ ID NO: 80599 - DNA, 80 bp, synthetic construct; identical to SEQ ID NO: 47115
  source 1..80: mol_type = other DNA

SEQ ID NO: 80600 - DNA, 80 bp, synthetic construct; identical to SEQ ID NO: 47116
  source 1..80: mol_type = other DNA

SEQ ID NO: 80601 - DNA, 80 bp, synthetic construct; identical to SEQ ID NO: 15641
  source 1..80: mol_type = other DNA

SEQ ID NO: 80602 - DNA, 80 bp, synthetic construct; identical to SEQ ID NO: 47119
  source 1..80: mol_type = other DNA

SEQ ID NO: 80603 - DNA, 80 bp, synthetic construct; identical to SEQ ID NO: 47120
  source 1..80: mol_type = other DNA

SEQ ID NO: 80604 - DNA, 80 bp, synthetic construct; identical to SEQ ID NO: 15642
  source 1..80: mol_type = other DNA

SEQ ID NO: 80605 - DNA, 80 bp, synthetic construct; identical to SEQ ID NO: 47122
  source 1..80: mol_type = other DNA

SEQ ID NO: 80606 - DNA, 80 bp, synthetic construct; identical to SEQ ID NO: 47123
  source 1..80: mol_type = other DNA

SEQ ID NO: 80607 - DNA, 80 bp, synthetic construct; identical to SEQ ID NO: 15643
  source 1..80: mol_type = other DNA

SEQ ID NO: 80608 - DNA, 80 bp, synthetic construct; identical to SEQ ID NO: 47125
  source 1..80: mol_type = other DNA

SEQ ID NO: 80609 - DNA, 80 bp, synthetic construct; identical to SEQ ID NO: 47126
  source 1..80: mol_type = other DNA

SEQ ID NO: 80610 - DNA, 80 bp, synthetic construct; identical to SEQ ID NO: 47127
  source 1..80: mol_type = other DNA

SEQ ID NO: 80611 - DNA, 80 bp, synthetic construct; identical to SEQ ID NO: 15644
  source 1..80: mol_type = other DNA

SEQ ID NO: 80612 - DNA, 80 bp, synthetic construct; identical to SEQ ID NO: 47129
  source 1..80: mol_type = other DNA

SEQ ID NO: 80613 - DNA, 80 bp, synthetic construct; identical to SEQ ID NO: 47130
  source 1..80: mol_type = other DNA

SEQ ID NO: 80614 - DNA, 80 bp, synthetic construct; identical to SEQ ID NO: 47131
  source 1..80: mol_type = other DNA

SEQ ID NO: 80615 - DNA, 80 bp, synthetic construct; identical to SEQ ID NO: 15645
  source 1..80: mol_type = other DNA

SEQ ID NO: 80616 - DNA, 80 bp, synthetic construct; identical to SEQ ID NO: 47133
  source 1..80: mol_type = other DNA

SEQ ID NO: 80617 - DNA, 80 bp, synthetic construct; identical to SEQ ID NO: 47134
  source 1..80: mol_type = other DNA

SEQ ID NO: 80618 - DNA, 80 bp, synthetic construct; identical to SEQ ID NO: 47135
  source 1..80: mol_type = other DNA

SEQ ID NO: 80619 - DNA, 80 bp, synthetic construct; identical to SEQ ID NO: 47136
  source 1..80: mol_type = other DNA

SEQ ID NO: 80620 - DNA, 80 bp, synthetic construct; identical to SEQ ID NO: 15646
  source 1..80: mol_type = other DNA

SEQ ID NO: 80621 - DNA, 80 bp, synthetic construct; identical to SEQ ID NO: 47138
  source 1..80: mol_type = other DNA

SEQ ID NO: 80622 - DNA, 80 bp, synthetic construct; identical to SEQ ID NO: 47139
  source 1..80: mol_type = other DNA

SEQ ID NO: 80623 - DNA, 80 bp, synthetic construct; identical to SEQ ID NO: 15647
  source 1..80: mol_type = other DNA

SEQ ID NO: 80624 - DNA, 80 bp, synthetic construct; identical to SEQ ID NO: 47141
  source 1..80: mol_type = other DNA

SEQ ID NO: 80625 - DNA, 80 bp, synthetic construct; identical to SEQ ID NO: 47143
  source 1..80: mol_type = other DNA

SEQ ID NO: 80626 - DNA, 80 bp, synthetic construct; identical to SEQ ID NO: 47144
  source 1..80: mol_type = other DNA

SEQ ID NO: 80627 - DNA, 80 bp, synthetic construct; identical to SEQ ID NO: 15648
  source 1..80: mol_type = other DNA

SEQ ID NO: 80628 - DNA, 80 bp, synthetic construct; identical to SEQ ID NO: 47146
  source 1..80: mol_type = other DNA

SEQ ID NO: 80629 - DNA, 80 bp, synthetic construct; identical to SEQ ID NO: 47147
  source 1..80: mol_type = other DNA

SEQ ID NO: 80630 - DNA, 80 bp, synthetic construct; identical to SEQ ID NO: 47148
  source 1..80: mol_type = other DNA

SEQ ID NO: 80631 - DNA, 80 bp, synthetic construct; identical to SEQ ID NO: 15649
  source 1..80: mol_type = other DNA

SEQ ID NO: 80632 - DNA, 80 bp, synthetic construct; identical to SEQ ID NO: 47150
  source 1..80: mol_type = other DNA

SEQ ID NO: 80633 - DNA, 80 bp, synthetic construct; identical to SEQ ID NO: 47151
  source 1..80: mol_type = other DNA

SEQ ID NO: 80634 - DNA, 80 bp, synthetic construct; identical to SEQ ID NO: 47152
  source 1..80: mol_type = other DNA

SEQ ID NO: 80635 - DNA, 80 bp, synthetic construct; identical to SEQ ID NO: 15650
  source 1..80: mol_type = other DNA

SEQ ID NO: 80636 - DNA, 80 bp, synthetic construct; identical to SEQ ID NO: 47154
  source 1..80: mol_type = other DNA

SEQ ID NO: 80637 - DNA, 80 bp, synthetic construct; identical to SEQ ID NO: 47155
  source 1..80: mol_type = other DNA

SEQ ID NO: 80638 - DNA, 80 bp, synthetic construct; identical to SEQ ID NO: 47156
  source 1..80: mol_type = other DNA

SEQ ID NO: 80639 - DNA, 80 bp, synthetic construct; identical to SEQ ID NO: 15651
  source 1..80: mol_type = other DNA

SEQ ID NO: 80640 - DNA, 80 bp, synthetic construct; identical to SEQ ID NO: 47158
  source 1..80: mol_type = other DNA

SEQ ID NO: 80641 - DNA, 80 bp, synthetic construct; identical to SEQ ID NO: 47159
  source 1..80: mol_type = other DNA

SEQ ID NO: 80642 - DNA, 80 bp, synthetic construct; identical to SEQ ID NO: 47160
  source 1..80: mol_type = other DNA

SEQ ID NO: 80643 - DNA, 80 bp, synthetic construct; identical to SEQ ID NO: 15652
  source 1..80: mol_type = other DNA

SEQ ID NO: 80644 - DNA, 80 bp, synthetic construct; identical to SEQ ID NO: 47163
  source 1..80: mol_type = other DNA

SEQ ID NO: 80645 - DNA, 80 bp, synthetic construct; identical to SEQ ID NO: 47164
  source 1..80: mol_type = other DNA

SEQ ID NO: 80646 - DNA, 80 bp, synthetic construct; identical to SEQ ID NO: 47165
  source 1..80: mol_type = other DNA

SEQ ID NO: 80647 - DNA, 80 bp, synthetic construct; identical to SEQ ID NO: 15653
  source 1..80: mol_type = other DNA

SEQ ID NO: 80648 - DNA, 80 bp, synthetic construct; identical to SEQ ID NO: 47167
  source 1..80: mol_type = other DNA

SEQ ID NO: 80649 - DNA, 80 bp, synthetic construct; identical to SEQ ID NO: 47168
  source 1..80: mol_type = other DNA

SEQ ID NO: 80650 - DNA, 80 bp, synthetic construct; identical to SEQ ID NO: 15654
  source 1..80: mol_type = other DNA

SEQ ID NO: 80651 - DNA, 80 bp, synthetic construct; identical to SEQ ID NO: 47170
  source 1..80: mol_type = other DNA

SEQ ID NO: 80652 - DNA, 80 bp, synthetic construct; identical to SEQ ID NO: 47171
  source 1..80: mol_type = other DNA

SEQ ID NO: 80653 - DNA, 80 bp, synthetic construct; identical to SEQ ID NO: 47172
  source 1..80: mol_type = other DNA

SEQ ID NO: 80654 - DNA, 80 bp, synthetic construct; identical to SEQ ID NO: 15655
  source 1..80: mol_type = other DNA

SEQ ID NO: 80655 - DNA, 80 bp, synthetic construct; identical to SEQ ID NO: 47174
  source 1..80: mol_type = other DNA

SEQ ID NO: 80656 - DNA, 80 bp, synthetic construct; identical to SEQ ID NO: 47175
  source 1..80: mol_type = other DNA

SEQ ID NO: 80657 - DNA, 80 bp, synthetic construct; identical to SEQ ID NO: 47176
  source 1..80: mol_type = other DNA

SEQ ID NO: 80658 - DNA, 80 bp, synthetic construct; identical to SEQ ID NO: 15656
  source 1..80: mol_type = other DNA

SEQ ID NO: 80659 - DNA, 80 bp, synthetic construct; identical to SEQ ID NO: 47178
  source 1..80: mol_type = other DNA

SEQ ID NO: 80660 - DNA, 80 bp, synthetic construct; identical to SEQ ID NO: 47179
  source 1..80: mol_type = other DNA

SEQ ID NO: 80661 - DNA, 80 bp, synthetic construct; identical to SEQ ID NO: 47180
  source 1..80: mol_type = other DNA

SEQ ID NO: 80662 - DNA, 80 bp, synthetic construct; identical to SEQ ID NO: 47181
  source 1..80: mol_type = other DNA

SEQ ID NO: 80663 - DNA, 80 bp, synthetic construct; identical to SEQ ID NO: 15657
  source 1..80: mol_type = other DNA

SEQ ID NO: 80664 - DNA, 80 bp, synthetic construct; identical to SEQ ID NO: 47183
  source 1..80: mol_type = other DNA

SEQ ID NO: 80665 - DNA, 80 bp, synthetic construct; identical to SEQ ID NO: 47184
  source 1..80: mol_type = other DNA

SEQ ID NO: 80666 - DNA, 80 bp, synthetic construct; identical to SEQ ID NO: 47185
  source 1..80: mol_type = other DNA

SEQ ID NO: 80667 - DNA, 80 bp, synthetic construct; identical to SEQ ID NO: 15658
  source 1..80: mol_type = other DNA

SEQ ID NO: 80668 - DNA, 80 bp, synthetic construct; identical to SEQ ID NO: 47187
  source 1..80: mol_type = other DNA

SEQ ID NO: 80669 - DNA, 80 bp, synthetic construct; identical to SEQ ID NO: 47188
  source 1..80: mol_type = other DNA

SEQ ID NO: 80670 - DNA, 80 bp, synthetic construct; identical to SEQ ID NO: 15659
  source 1..80: mol_type = other DNA

SEQ ID NO: 80671 - DNA, 80 bp, synthetic construct; identical to SEQ ID NO: 47190
  source 1..80: mol_type = other DNA

SEQ ID NO: 80672 - DNA, 80 bp, synthetic construct; identical to SEQ ID NO: 47191
  source 1..80: mol_type = other DNA

SEQ ID NO: 80673 - DNA, 80 bp, synthetic construct; identical to SEQ ID NO: 15660
  source 1..80: mol_type = other DNA

SEQ ID NO: 80674 - DNA, 80 bp, synthetic construct; identical to SEQ ID NO: 47194
  source 1..80: mol_type = other DNA

SEQ ID NO: 80675 - DNA, 80 bp, synthetic construct; identical to SEQ ID NO: 47195
  source 1..80: mol_type = other DNA

SEQ ID NO: 80676 - DNA, 80 bp, synthetic construct; identical to SEQ ID NO: 15661
  source 1..80: mol_type = other DNA

SEQ ID NO: 80677 - DNA, 80 bp, synthetic construct; identical to SEQ ID NO: 47198
  source 1..80: mol_type = other DNA

SEQ ID NO: 80678 - DNA, 80 bp, synthetic construct; identical to SEQ ID NO: 47199
  source 1..80: mol_type = other DNA

SEQ ID NO: 80679 - DNA, 80 bp, synthetic construct; identical to SEQ ID NO: 47200
  source 1..80: mol_type = other DNA

SEQ ID NO: 80680 - DNA, 80 bp, synthetic construct; identical to SEQ ID NO: 15662
  source 1..80: mol_type = other DNA

SEQ ID NO: 80681 - DNA, 80 bp, synthetic construct; identical to SEQ ID NO: 47202
  source 1..80: mol_type = other DNA

SEQ ID NO: 80682 - DNA, 80 bp, synthetic construct; identical to SEQ ID NO: 47203
  source 1..80: mol_type = other DNA

SEQ ID NO: 80683 - DNA, 80 bp, synthetic construct; identical to SEQ ID NO: 47204
  source 1..80: mol_type = other DNA

SEQ ID NO: 80684 - DNA, 80 bp, synthetic construct; identical to SEQ ID NO: 47205
  source 1..80: mol_type = other DNA

SEQ ID NO: 80685 - DNA, 80 bp, synthetic construct; identical to SEQ ID NO: 15663
  source 1..80: mol_type = other DNA

SEQ ID NO: 80686 - DNA, 80 bp, synthetic construct; identical to SEQ ID NO: 47207
  source 1..80: mol_type = other DNA

SEQ ID NO: 80687 - DNA, 80 bp, synthetic construct; identical to SEQ ID NO: 47208
  source 1..80: mol_type = other DNA

SEQ ID NO: 80688 - DNA, 80 bp, synthetic construct; identical to SEQ ID NO: 47209
  source 1..80: mol_type = other DNA

SEQ ID NO: 80689 - DNA, 80 bp, synthetic construct; identical to SEQ ID NO: 15664
  source 1..80: mol_type = other DNA

SEQ ID NO: 80690 - DNA, 80 bp, synthetic construct; identical to SEQ ID NO: 47211
  source 1..80: mol_type = other DNA

SEQ ID NO: 80691 - DNA, 80 bp, synthetic construct; identical to SEQ ID NO: 47212
  source 1..80: mol_type = other DNA

SEQ ID NO: 80692 - DNA, 80 bp, synthetic construct; identical to SEQ ID NO: 15665
  source 1..80: mol_type = other DNA

SEQ ID NO: 80693 - DNA, 80 bp, synthetic construct; identical to SEQ ID NO: 47214
  source 1..80: mol_type = other DNA

SEQ ID NO: 80694 - DNA, 80 bp, synthetic construct; identical to SEQ ID NO: 47215
  source 1..80: mol_type = other DNA

SEQ ID NO: 80695 - DNA, 80 bp, synthetic construct; identical to SEQ ID NO: 47217
  source 1..80: mol_type = other DNA

SEQ ID NO: 80696 - DNA, 80 bp, synthetic construct; identical to SEQ ID NO: 15666
  source 1..80: mol_type = other DNA

SEQ ID NO: 80697 - DNA, 80 bp, synthetic construct; identical to SEQ ID NO: 47220
  source 1..80: mol_type = other DNA

SEQ ID NO: 80698 - DNA, 80 bp, synthetic construct; identical to SEQ ID NO: 47221
  source 1..80: mol_type = other DNA

SEQ ID NO: 80699 - DNA, 80 bp, synthetic construct; identical to SEQ ID NO: 15667
  source 1..80: mol_type = other DNA

SEQ ID NO: 80700 - DNA, 80 bp, synthetic construct; identical to SEQ ID NO: 47224
  source 1..80: mol_type = other DNA

SEQ ID NO: 80701 - DNA, 80 bp, synthetic construct; identical to SEQ ID NO: 47225
  source 1..80: mol_type = other DNA

SEQ ID NO: 80702 - DNA, 80 bp, synthetic construct; identical to SEQ ID NO: 15668
  source 1..80: mol_type = other DNA

SEQ ID NO: 80703 - DNA, 80 bp, synthetic construct; identical to SEQ ID NO: 47227
  source 1..80: mol_type = other DNA

SEQ ID NO: 80704 - DNA, 80 bp, synthetic construct; identical to SEQ ID NO: 47228
  source 1..80: mol_type = other DNA

SEQ ID NO: 80705 - DNA, 80 bp, synthetic construct; identical to SEQ ID NO: 15669
  source 1..80: mol_type = other DNA

SEQ ID NO: 80706 - DNA, 80 bp, synthetic construct; identical to SEQ ID NO: 47230
  source 1..80: mol_type = other DNA

SEQ ID NO: 80707 - DNA, 80 bp, synthetic construct; identical to SEQ ID NO: 47231
  source 1..80: mol_type = other DNA

SEQ ID NO: 80708 - DNA, 80 bp, synthetic construct; identical to SEQ ID NO: 47232
  source 1..80: mol_type = other DNA

SEQ ID NO: 80709 - DNA, 80 bp, synthetic construct; identical to SEQ ID NO: 47233
  source 1..80: mol_type = other DNA

SEQ ID NO: 80710 - DNA, 80 bp, synthetic construct; identical to SEQ ID NO: 47234
  source 1..80: mol_type = other DNA

SEQ ID NO: 80711 - DNA, 80 bp, synthetic construct; identical to SEQ ID NO: 47235
  source 1..80: mol_type = other DNA

SEQ ID NO: 80712 - DNA, 80 bp, synthetic construct; identical to SEQ ID NO: 47236
  source 1..80: mol_type = other DNA

SEQ ID NO: 80713 - DNA, 80 bp, synthetic construct; identical to SEQ ID NO: 15670
  source 1..80: mol_type = other DNA

SEQ ID NO: 80714 - DNA, 80 bp, synthetic construct; identical to SEQ ID NO: 47238
  source 1..80: mol_type = other DNA

SEQ ID NO: 80715 - DNA, 80 bp, synthetic construct; identical to SEQ ID NO: 15671
  source 1..80: mol_type = other DNA

SEQ ID NO: 80716 - DNA, 80 bp, synthetic construct; identical to SEQ ID NO: 47240
  source 1..80: mol_type = other DNA

SEQ ID NO: 80717 - DNA, 80 bp, synthetic construct; identical to SEQ ID NO: 47241
  source 1..80: mol_type = other DNA

SEQ ID NO: 80718 - DNA, 80 bp, synthetic construct; identical to SEQ ID NO: 47242
  source 1..80: mol_type = other DNA

SEQ ID NO: 80719 - DNA, 80 bp, synthetic construct; identical to SEQ ID NO: 47243
  source 1..80: mol_type = other DNA

SEQ ID NO: 80720 - DNA, 80 bp, synthetic construct; identical to SEQ ID NO: 15672
  source 1..80: mol_type = other DNA

SEQ ID NO: 80721 - DNA, 80 bp, synthetic construct; identical to SEQ ID NO: 47245
  source 1..80: mol_type = other DNA

SEQ ID NO: 80722 - DNA, 80 bp, synthetic construct; identical to SEQ ID NO: 47246
  source 1..80: mol_type = other DNA

SEQ ID NO: 80723 - DNA, 80 bp, synthetic construct; identical to SEQ ID NO: 47247
  source 1..80: mol_type = other DNA

SEQ ID NO: 80724 - DNA, 80 bp, synthetic construct; identical to SEQ ID NO: 15673
  source 1..80: mol_type = other DNA

SEQ ID NO: 80725 - DNA, 80 bp, synthetic construct; identical to SEQ ID NO: 47249
  source 1..80: mol_type = other DNA

SEQ ID NO: 80726 - DNA, 80 bp, synthetic construct; identical to SEQ ID NO: 47250
  source 1..80: mol_type = other DNA

SEQ ID NO: 80727 - DNA, 80 bp, synthetic construct; identical to SEQ ID NO: 47251
  source 1..80: mol_type = other DNA

SEQ ID NO: 80728 - DNA, 80 bp, synthetic construct; identical to SEQ ID NO: 47252
  source 1..80: mol_type = other DNA

SEQ ID NO: 80729 - DNA, 80 bp, synthetic construct; identical to SEQ ID NO: 15674
  source 1..80: mol_type = other DNA

SEQ ID NO: 80730 - DNA, 80 bp, synthetic construct; identical to SEQ ID NO: 47254
  source 1..80: mol_type = other DNA

SEQ ID NO: 80731 - DNA, 80 bp, synthetic construct; identical to SEQ ID NO: 47255
  source 1..80: mol_type = other DNA

SEQ ID NO: 80732 - DNA, 80 bp, synthetic construct; identical to SEQ ID NO: 47256
  source 1..80: mol_type = other DNA

SEQ ID NO: 80733 - DNA, 80 bp, synthetic construct; identical to SEQ ID NO: 47257
  source 1..80: mol_type = other DNA

SEQ ID NO: 80734 - DNA, 80 bp, synthetic construct; identical to SEQ ID NO: 47258
  source 1..80: mol_type = other DNA

SEQ ID NO: 80735 - DNA, 80 bp, synthetic construct; identical to SEQ ID NO: 47259
  source 1..80: mol_type = other DNA

SEQ ID NO: 80736 - DNA, 80 bp, synthetic construct; identical to SEQ ID NO: 15675
  source 1..80: mol_type = other DNA

SEQ ID NO: 80737 - DNA, 80 bp, synthetic construct; identical to SEQ ID NO: 47261
  source 1..80: mol_type = other DNA

SEQ ID NO: 80738 - DNA, 80 bp, synthetic construct; identical to SEQ ID NO: 47262
  source 1..80: mol_type = other DNA

SEQ ID NO: 80739 - DNA, 80 bp, synthetic construct; identical to SEQ ID NO: 47263
  source 1..80: mol_type = other DNA

SEQ ID NO: 80740 - DNA, 80 bp, synthetic construct; identical to SEQ ID NO: 15676
  source 1..80: mol_type = other DNA

SEQ ID NO: 80741 - DNA, 80 bp, synthetic construct; identical to SEQ ID NO: 47265
  source 1..80: mol_type = other DNA

SEQ ID NO: 80742 - DNA, 80 bp, synthetic construct; identical to SEQ ID NO: 47266
  source 1..80: mol_type = other DNA

SEQ ID NO: 80743 - DNA, 80 bp, synthetic construct; identical to SEQ ID NO: 47267
  source 1..80: mol_type = other DNA

SEQ ID NO: 80744 - DNA, 80 bp, synthetic construct; identical to SEQ ID NO: 15677
  source 1..80: mol_type = other DNA

SEQ ID NO: 80745 - DNA, 80 bp, synthetic construct; identical to SEQ ID NO: 47269
  source 1..80: mol_type = other DNA

SEQ ID NO: 80746 - DNA, 80 bp, synthetic construct; identical to SEQ ID NO: 47270
  source 1..80: mol_type = other DNA

SEQ ID NO: 80747 - DNA, 80 bp, synthetic construct; identical to SEQ ID NO: 47271
  source 1..80: mol_type = other DNA

SEQ ID NO: 80748 - DNA, 80 bp, synthetic construct; identical to SEQ ID NO: 47272
  source 1..80: mol_type = other DNA

SEQ ID NO: 80749 - DNA, 80 bp, synthetic construct; identical to SEQ ID NO: 15678
  source 1..80: mol_type = other DNA

SEQ ID NO: 80750 - DNA, 80 bp, synthetic construct; identical to SEQ ID NO: 47274
  source 1..80: mol_type = other DNA

SEQ ID NO: 80751 - DNA, 80 bp, synthetic construct; identical to SEQ ID NO: 47275
  source 1..80: mol_type = other DNA

SEQ ID NO: 80752 - DNA, 80 bp, synthetic construct; identical to SEQ ID NO: 47276
  source 1..80: mol_type = other DNA

SEQ ID NO: 80753 - DNA, 80 bp, synthetic construct; identical to SEQ ID NO: 47277
  source 1..80: mol_type = other DNA

SEQ ID NO: 80754 - DNA, 80 bp, synthetic construct; identical to SEQ ID NO: 15679
  source 1..80: mol_type = other DNA

SEQ ID NO: 80755 - DNA, 80 bp, synthetic construct; identical to SEQ ID NO: 47279
  source 1..80: mol_type = other DNA

SEQ ID NO: 80756 - DNA, 80 bp, synthetic construct; identical to SEQ ID NO: 47280
  source 1..80: mol_type = other DNA

SEQ ID NO: 80757 - DNA, 80 bp, synthetic construct; identical to SEQ ID NO: 15680
  source 1..80: mol_type = other DNA

SEQ ID NO: 80758 - DNA, 80 bp, synthetic construct; identical to SEQ ID NO: 47283
  source 1..80: mol_type = other DNA

SEQ ID NO: 80759 - DNA, 80 bp, synthetic construct; identical to SEQ ID NO: 47284
  source 1..80: mol_type = other DNA

SEQ ID NO: 80760 - DNA, 80 bp, synthetic construct; identical to SEQ ID NO: 15681
  source 1..80: mol_type = other DNA

SEQ ID NO: 80761 - DNA, 80 bp, synthetic construct; identical to SEQ ID NO: 47286
  source 1..80: mol_type = other DNA

SEQ ID NO: 80762 - DNA, 80 bp, synthetic construct; identical to SEQ ID NO: 47288
  source 1..80: mol_type = other DNA

SEQ ID NO: 80763 - DNA, 80 bp, synthetic construct; identical to SEQ ID NO: 47289
  source 1..80: mol_type = other DNA

SEQ ID NO: 80764 - DNA, 80 bp, synthetic construct; identical to SEQ ID NO: 15682
  source 1..80: mol_type = other DNA

SEQ ID NO: 80765 - DNA, 80 bp, synthetic construct; identical to SEQ ID NO: 47291
  source 1..80: mol_type = other DNA

SEQ ID NO: 80766 - DNA, 80 bp, synthetic construct; identical to SEQ ID NO: 47292
  source 1..80: mol_type = other DNA

SEQ ID NO: 80767 - DNA, 80 bp, synthetic construct; identical to SEQ ID NO: 15683
  source 1..80: mol_type = other DNA

SEQ ID NO: 80768 - DNA, 80 bp, synthetic construct; identical to SEQ ID NO: 47295
  source 1..80: mol_type = other DNA

SEQ ID NO: 80769 - DNA, 80 bp, synthetic construct; identical to SEQ ID NO: 47296
  source 1..80: mol_type = other DNA

SEQ ID NO: 80770 - DNA, 80 bp, synthetic construct; identical to SEQ ID NO: 15684
  source 1..80: mol_type = other DNA

SEQ ID NO: 80771 - DNA, 80 bp, synthetic construct; identical to SEQ ID NO: 47299
  source 1..80: mol_type = other DNA

SEQ ID NO: 80772 - DNA, 80 bp, synthetic construct; identical to SEQ ID NO: 15685
  source 1..80: mol_type = other DNA

SEQ ID NO: 80773 - DNA, 80 bp, synthetic construct; identical to SEQ ID NO: 47302
  source 1..80: mol_type = other DNA

SEQ ID NO: 80774 - DNA, 80 bp, synthetic construct; identical to SEQ ID NO: 47303
  source 1..80: mol_type = other DNA

SEQ ID NO: 80775 - DNA, 80 bp, synthetic construct; identical to SEQ ID NO: 47304
  source 1..80: mol_type = other DNA

SEQ ID NO: 80776 - DNA, 80 bp, synthetic construct; identical to SEQ ID NO: 15686
  source 1..80: mol_type = other DNA

SEQ ID NO: 80777 - DNA, 80 bp, synthetic construct; identical to SEQ ID NO: 47306
  source 1..80: mol_type = other DNA

SEQ ID NO: 80778 - DNA, 80 bp, synthetic construct; identical to SEQ ID NO: 47307
  source 1..80: mol_type = other DNA

SEQ ID NO: 80779 - DNA, 80 bp, synthetic construct; identical to SEQ ID NO: 47308
  source 1..80: mol_type = other DNA

SEQ ID NO: 80780 - DNA, 80 bp, synthetic construct; identical to SEQ ID NO: 47309
  source 1..80: mol_type = other DNA

SEQ ID NO: 80781 - DNA, 80 bp, synthetic construct; identical to SEQ ID NO: 15687
  source 1..80: mol_type = other DNA

SEQ ID NO: 80782 - DNA, 80 bp, synthetic construct; identical to SEQ ID NO: 47311
  source 1..80: mol_type = other DNA

SEQ ID NO: 80783 - DNA, 80 bp, synthetic construct; identical to SEQ ID NO: 47312
  source 1..80: mol_type = other DNA

SEQ ID NO: 80784 - DNA, 80 bp, synthetic construct; identical to SEQ ID NO: 15688
  source 1..80: mol_type = other DNA

SEQ ID NO: 80785 - DNA, 80 bp, synthetic construct; identical to SEQ ID NO: 47314
  source 1..80: mol_type = other DNA

SEQ ID NO: 80786 - DNA, 80 bp, synthetic construct; identical to SEQ ID NO: 47315
  source 1..80: mol_type = other DNA

SEQ ID NO: 80787 - DNA, 80 bp, synthetic construct; identical to SEQ ID NO: 47316
  source 1..80: mol_type = other DNA

SEQ ID NO: 80788 - DNA, 80 bp, synthetic construct; identical to SEQ ID NO: 47317
  source 1..80: mol_type = other DNA

SEQ ID NO: 80789 - DNA, 80 bp, synthetic construct; identical to SEQ ID NO: 47318
  source 1..80: mol_type = other DNA

SEQ ID NO: 80790 - DNA, 80 bp, synthetic construct; identical to SEQ ID NO: 15689
  source 1..80: mol_type = other DNA

SEQ ID NO: 80791 - DNA, 80 bp, synthetic construct; identical to SEQ ID NO: 47320
  source 1..80: mol_type = other DNA

SEQ ID NO: 80792 - DNA, 80 bp, synthetic construct; identical to SEQ ID NO: 47321
  source 1..80: mol_type = other DNA

SEQ ID NO: 80793 - DNA, 80 bp, synthetic construct; identical to SEQ ID NO: 15690
  source 1..80: mol_type = other DNA

SEQ ID NO: 80794 - DNA, 80 bp, synthetic construct; identical to SEQ ID NO: 47324
  source 1..80: mol_type = other DNA

SEQ ID NO: 80795 - DNA, 80 bp, synthetic construct; identical to SEQ ID NO: 47325
  source 1..80: mol_type = other DNA

SEQ ID NO: 80796 - DNA, 80 bp, synthetic construct; identical to SEQ ID NO: 47326
  source 1..80: mol_type = other DNA

SEQ ID NO: 80797 - DNA, 80 bp, synthetic construct; identical to SEQ ID NO: 15691
  source 1..80: mol_type = other DNA

SEQ ID NO: 80798 - DNA, 80 bp, synthetic construct; identical to SEQ ID NO: 47328
  source 1..80: mol_type = other DNA

SEQ ID NO: 80799 - DNA, 80 bp, synthetic construct; identical to SEQ ID NO: 47329
  source 1..80: mol_type = other DNA

SEQ ID NO: 80800 - DNA, 80 bp, synthetic construct; identical to SEQ ID NO: 15692
  source 1..80: mol_type = other DNA

SEQ ID NO: 80801 - DNA, 80 bp, synthetic construct; identical to SEQ ID NO: 47332
  source 1..80: mol_type = other DNA

SEQ ID NO: 80802 - DNA, 80 bp, synthetic construct; identical to SEQ ID NO: 47333
  source 1..80: mol_type = other DNA

SEQ ID NO: 80803 - DNA, 80 bp, synthetic construct; identical to SEQ ID NO: 15693
  source 1..80: mol_type = other DNA

SEQ ID NO: 80804 - DNA, 80 bp, synthetic construct; identical to SEQ ID NO: 47335
  source 1..80: mol_type = other DNA

SEQ ID NO: 80805 - DNA, 80 bp, synthetic construct; identical to SEQ ID NO: 47336
  source 1..80: mol_type = other DNA

SEQ ID NO: 80806 - DNA, 80 bp, synthetic construct; identical to SEQ ID NO: 47337
  source 1..80: mol_type = other DNA

SEQ ID NO: 80807 - DNA, 80 bp, synthetic construct; identical to SEQ ID NO: 15694
  source 1..80: mol_type = other DNA

SEQ ID NO: 80808 - DNA, 80 bp, synthetic construct; identical to SEQ ID NO: 47340
  source 1..80: mol_type = other DNA

SEQ ID NO: 80809 - DNA, 80 bp, synthetic construct; identical to SEQ ID NO: 47341
  source 1..80: mol_type = other DNA

SEQ ID NO: 80810 - DNA, 80 bp, synthetic construct; identical to SEQ ID NO: 15695
  source 1..80: mol_type = other DNA

SEQ ID NO: 80811 - DNA, 80 bp, synthetic construct; identical to SEQ ID NO: 47343
  source 1..80: mol_type = other DNA

SEQ ID NO: 80812 - DNA, 80 bp, synthetic construct; identical to SEQ ID NO: 47344
  source 1..80: mol_type = other DNA

SEQ ID NO: 80813 - DNA, 80 bp, synthetic construct; identical to SEQ ID NO: 47345
  source 1..80: mol_type = other DNA

SEQ ID NO: 80814 - DNA, 80 bp, synthetic construct; identical to SEQ ID NO: 15696
  source 1..80: mol_type = other DNA

SEQ ID NO: 80815 - DNA, 80 bp, synthetic construct; identical to SEQ ID NO: 47347
  source 1..80: mol_type = other DNA

SEQ ID NO: 80816 - DNA, 80 bp, synthetic construct; identical to SEQ ID NO: 47348
  source 1..80: mol_type = other DNA

SEQ ID NO: 80817 - DNA, 80 bp, synthetic construct; identical to SEQ ID NO: 47349
  source 1..80: mol_type = other DNA

SEQ ID NO: 80818 - DNA, 80 bp, synthetic construct; identical to SEQ ID NO: 15697
  source 1..80: mol_type = other DNA

SEQ ID NO: 80819 - DNA, 80 bp, synthetic construct; identical to SEQ ID NO: 47351
  source 1..80: mol_type = other DNA

SEQ ID NO: 80820 - DNA, 80 bp, synthetic construct; identical to SEQ ID NO: 47352
  source 1..80: mol_type = other DNA

SEQ ID NO: 80821 - DNA, 80 bp, synthetic construct; identical to SEQ ID NO: 47353
  source 1..80: mol_type = other DNA

SEQ ID NO: 80822 - DNA, 80 bp, synthetic construct; identical to SEQ ID NO: 15698
  source 1..80: mol_type = other DNA

SEQ ID NO: 80823 - DNA, 80 bp, synthetic construct; identical to SEQ ID NO: 47355
  source 1..80: mol_type = other DNA

SEQ ID NO: 80824 - DNA, 80 bp, synthetic construct; identical to SEQ ID NO: 47356
  source 1..80: mol_type = other DNA

SEQ ID NO: 80825 - DNA, 80 bp, synthetic construct; identical to SEQ ID NO: 47357
  source 1..80: mol_type = other DNA

SEQ ID NO: 80826 - DNA, 80 bp, synthetic construct; identical to SEQ ID NO: 15699
  source 1..80: mol_type = other DNA

SEQ ID NO: 80827 - DNA, 80 bp, synthetic construct; identical to SEQ ID NO: 47359
  source 1..80: mol_type = other DNA

SEQ ID NO: 80828 - DNA, 80 bp, synthetic construct; identical to SEQ ID NO: 47361
  source 1..80: mol_type = other DNA

SEQ ID NO: 80829 - DNA, 80 bp, synthetic construct; identical to SEQ ID NO: 15700
  source 1..80: mol_type = other DNA

SEQ ID NO: 80830 - DNA, 80 bp, synthetic construct; identical to SEQ ID NO: 47363
  source 1..80: mol_type = other DNA

SEQ ID NO: 80831 - DNA, 80 bp, synthetic construct; identical to SEQ ID NO: 47364
  source 1..80: mol_type = other DNA

SEQ ID NO: 80832 - DNA, 80 bp, synthetic construct; identical to SEQ ID NO: 47365
  source 1..80: mol_type = other DNA

SEQ ID NO: 80833 - DNA, 80 bp, synthetic construct; identical to SEQ ID NO: 47366
  source 1..80: mol_type = other DNA

SEQ ID NO: 80834 - DNA, 80 bp, synthetic construct; identical to SEQ ID NO: 15701
  source 1..80: mol_type = other DNA

SEQ ID NO: 80835 - DNA, 80 bp, synthetic construct; identical to SEQ ID NO: 47368
  source 1..80: mol_type = other DNA

SEQ ID NO: 80836 - DNA, 80 bp, synthetic construct; identical to SEQ ID NO: 47369
  source 1..80: mol_type = other DNA

SEQ ID NO: 80837 - DNA, 80 bp, synthetic construct; identical to SEQ ID NO: 15702
  source 1..80: mol_type = other DNA

SEQ ID NO: 80838 - DNA, 80 bp, synthetic construct; identical to SEQ ID NO: 47373
  source 1..80: mol_type = other DNA

SEQ ID NO: 80839 - DNA, 80 bp, synthetic construct; identical to SEQ ID NO: 47374
  source 1..80: mol_type = other DNA

SEQ ID NO: 80840 - DNA, 80 bp, synthetic construct; identical to SEQ ID NO: 15703
  source 1..80: mol_type = other DNA

SEQ ID NO: 80841 - DNA, 80 bp, synthetic construct; identical to SEQ ID NO: 47376
  source 1..80: mol_type = other DNA

SEQ ID NO: 80842 - DNA, 80 bp, synthetic construct; identical to SEQ ID NO: 47377
  source 1..80: mol_type = other DNA

SEQ ID NO: 80843 - DNA, 80 bp, synthetic construct; identical to SEQ ID NO: 47378
  source 1..80: mol_type = other DNA

SEQ ID NO: 80844 - DNA, 80 bp, synthetic construct; identical to SEQ ID NO: 15704
  source 1..80: mol_type = other DNA

SEQ ID NO: 80845 - DNA, 80 bp, synthetic construct; identical to SEQ ID NO: 47380
  source 1..80: mol_type = other DNA

SEQ ID NO: 80846 - DNA, 80 bp, synthetic construct; identical to SEQ ID NO: 47381
  source 1..80: mol_type = other DNA

SEQ ID NO: 80847 - DNA, 80 bp, synthetic construct; identical to SEQ ID NO: 47382
  source 1..80: mol_type = other DNA

SEQ ID NO: 80848 - DNA, 80 bp, synthetic construct; identical to SEQ ID NO: 47383
  source 1..80: mol_type = other DNA

SEQ ID NO: 80849 - DNA, 80 bp, synthetic construct; identical to SEQ ID NO: 15705
  source 1..80: mol_type = other DNA

SEQ ID NO: 80850 - DNA, 80 bp, synthetic construct; identical to SEQ ID NO: 47385
  source 1..80: mol_type = other DNA

SEQ ID NO: 80851 - DNA, 80 bp, synthetic construct; identical to SEQ ID NO: 47386
  source 1..80: mol_type = other DNA

SEQ ID NO: 80852 - DNA, 80 bp, synthetic construct; identical to SEQ ID NO: 15706
  source 1..80: mol_type = other DNA

SEQ ID NO: 80853 - DNA, 80 bp, synthetic construct; identical to SEQ ID NO: 47388
  source 1..80: mol_type = other DNA

SEQ ID NO: 80854 - DNA, 80 bp, synthetic construct; identical to SEQ ID NO: 47389
  source 1..80: mol_type = other DNA

SEQ ID NO: 80855 - DNA, 80 bp, synthetic construct; identical to SEQ ID NO: 47391
  source 1..80: mol_type = other DNA

SEQ ID NO: 80856 - DNA, 80 bp, synthetic construct; identical to SEQ ID NO: 15707
  source 1..80: mol_type = other DNA

SEQ ID NO: 80857 - DNA, 80 bp, synthetic construct; identical to SEQ ID NO: 47393
  source 1..80: mol_type = other DNA

SEQ ID NO: 80858 - DNA, 80 bp, synthetic construct; identical to SEQ ID NO: 15708
  source 1..80: mol_type = other DNA

SEQ ID NO: 80859 - DNA, 80 bp, synthetic construct; identical to SEQ ID NO: 47396
  source 1..80: mol_type = other DNA

SEQ ID NO: 80860 - DNA, 80 bp, synthetic construct; identical to SEQ ID NO: 47397
  source 1..80: mol_type = other DNA

SEQ ID NO: 80861 - DNA, 80 bp, synthetic construct; identical to SEQ ID NO: 47398
  source 1..80: mol_type = other DNA

SEQ ID NO: 80862 - DNA, 80 bp, synthetic construct; identical to SEQ ID NO: 15709
  source 1..80: mol_type = other DNA

SEQ ID NO: 80863 - DNA, 80 bp, synthetic construct; identical to SEQ ID NO: 47401
  source 1..80: mol_type = other DNA

SEQ ID NO: 80864 - DNA, 80 bp, synthetic construct; identical to SEQ ID NO: 47402
  source 1..80: mol_type = other DNA

SEQ ID NO: 80865 - DNA, 80 bp, synthetic construct; identical to SEQ ID NO: 15710
  source 1..80: mol_type = other DNA

SEQ ID NO: 80866 - DNA, 80 bp, synthetic construct; identical to SEQ ID NO: 47405
  source 1..80: mol_type = other DNA

SEQ ID NO: 80867 - DNA, 80 bp, synthetic construct; identical to SEQ ID NO: 47406
  source 1..80: mol_type = other DNA

SEQ ID NO: 80868 - DNA, 80 bp, synthetic construct; identical to SEQ ID NO: 47407
  source 1..80: mol_type = other DNA

SEQ ID NO: 80869 - DNA, 80 bp, synthetic construct; identical to SEQ ID NO: 15711
  source 1..80: mol_type = other DNA

SEQ ID NO: 80870 - DNA, 80 bp, synthetic construct; identical to SEQ ID NO: 47409
  source 1..80: mol_type = other DNA

SEQ ID NO: 80871 - DNA, 80 bp, synthetic construct; identical to SEQ ID NO: 15712
  source 1..80: mol_type = other DNA

SEQ ID NO: 80872 - DNA, 80 bp, synthetic construct; identical to SEQ ID NO: 47412
  source 1..80: mol_type = other DNA

SEQ ID NO: 80873 - DNA, 80 bp, synthetic construct; identical to SEQ ID NO: 47413
  source 1..80: mol_type = other DNA

SEQ ID NO: 80874 - DNA, 80 bp, synthetic construct; identical to SEQ ID NO: 47415
  source 1..80: mol_type = other DNA

SEQ ID NO: 80875 - DNA, 80 bp, synthetic construct; identical to SEQ ID NO: 15713
  source 1..80: mol_type = other DNA

SEQ ID NO: 80876 - DNA, 80 bp, synthetic construct; identical to SEQ ID NO: 47417
  source 1..80: mol_type = other DNA

SEQ ID NO: 80877 - DNA, 80 bp, synthetic construct; identical to SEQ ID NO: 47418
  source 1..80: mol_type = other DNA

SEQ ID NO: 80878 - DNA, 80 bp, synthetic construct; identical to SEQ ID NO: 47419
  source 1..80: mol_type = other DNA

SEQ ID NO: 80879 - DNA, 80 bp, synthetic construct; identical to SEQ ID NO: 15714
  source 1..80: mol_type = other DNA

SEQ ID NO: 80880 - DNA, 80 bp, synthetic construct; identical to SEQ ID NO: 47421
  source 1..80: mol_type = other DNA

SEQ ID NO: 80881 - DNA, 80 bp, synthetic construct; identical to SEQ ID NO: 47422
  source 1..80: mol_type = other DNA

SEQ ID NO: 80882 - DNA, 80 bp, synthetic construct; identical to SEQ ID NO: 47423
  source 1..80: mol_type = other DNA

SEQ ID NO: 80883 - DNA, 80 bp, synthetic construct; identical to SEQ ID NO: 15715
  source 1..80: mol_type = other DNA

SEQ ID NO: 80884 - DNA, 80 bp, synthetic construct; identical to SEQ ID NO: 47425
  source 1..80: mol_type = other DNA

SEQ ID NO: 80885 - DNA, 80 bp, synthetic construct; identical to SEQ ID NO: 47426
  source 1..80: mol_type = other DNA

SEQ ID NO: 80886 - DNA, 80 bp, synthetic construct; identical to SEQ ID NO: 15716
  source 1..80: mol_type = other DNA

SEQ ID NO: 80887 - DNA, 80 bp, synthetic construct; identical to SEQ ID NO: 47428
  source 1..80: mol_type = other DNA

SEQ ID NO: 80888 - DNA, 80 bp, synthetic construct; identical to SEQ ID NO: 47430
  source 1..80: mol_type = other DNA

SEQ ID NO: 80889 - DNA, 80 bp, synthetic construct; identical to SEQ ID NO: 47431
  source 1..80: mol_type = other DNA

SEQ ID NO: 80890 - DNA, 80 bp, synthetic construct; identical to SEQ ID NO: 15717
  source 1..80: mol_type = other DNA

SEQ ID NO: 80891 - DNA, 80 bp, synthetic construct; identical to SEQ ID NO: 47433
  source 1..80: mol_type = other DNA

SEQ ID NO: 80892 - DNA, 80 bp, synthetic construct; identical to SEQ ID NO: 47434
  source 1..80: mol_type = other DNA

SEQ ID NO: 80893 - DNA, 80 bp, synthetic construct; identical to SEQ ID NO: 47435
  source 1..80: mol_type = other DNA

SEQ ID NO: 80894 - DNA, 80 bp, synthetic construct; identical to SEQ ID NO: 15718
  source 1..80: mol_type = other DNA

SEQ ID NO: 80895 - DNA, 80 bp, synthetic construct; identical to SEQ ID NO: 47438
  source 1..80: mol_type = other DNA

SEQ ID NO: 80896 - DNA, 80 bp, synthetic construct; identical to SEQ ID NO: 15719
  source 1..80: mol_type = other DNA

SEQ ID NO: 80897 - DNA, 80 bp, synthetic construct; identical to SEQ ID NO: 47442
  source 1..80: mol_type = other DNA

SEQ ID NO: 80898 - DNA, 80 bp, synthetic construct; identical to SEQ ID NO: 15720
  source 1..80: mol_type = other DNA

SEQ ID NO: 80899 - DNA, 80 bp, synthetic construct; identical to SEQ ID NO: 47444
  source 1..80: mol_type = other DNA

SEQ ID NO: 80900 - DNA, 80 bp, synthetic construct; identical to SEQ ID NO: 47445
  source 1..80: mol_type = other DNA

SEQ ID NO: 80901 - DNA, 80 bp, synthetic construct; identical to SEQ ID NO: 47446
  source 1..80: mol_type = other DNA

SEQ ID NO: 80902 - DNA, 80 bp, synthetic construct; identical to SEQ ID NO: 47447
  source 1..80: mol_type = other DNA

SEQ ID NO: 80903 - DNA, 80 bp, synthetic construct; identical to SEQ ID NO: 15721
  source 1..80: mol_type = other DNA

SEQ ID NO: 80904 - DNA, 80 bp, synthetic construct; identical to SEQ ID NO: 47451
  source 1..80: mol_type = other DNA

SEQ ID NO: 80905 - DNA, 80 bp, synthetic construct; identical to SEQ ID NO: 15722
  source 1..80: mol_type = other DNA

SEQ ID NO: 80906 - DNA, 80 bp, synthetic construct; identical to SEQ ID NO: 47453
  source 1..80: mol_type = other DNA

SEQ ID NO: 80907 - DNA, 80 bp, synthetic construct; identical to SEQ ID NO: 47454
  source 1..80: mol_type = other DNA

SEQ ID NO: 80908 - DNA, 80 bp, synthetic construct; identical to SEQ ID NO: 15723
  source 1..80: mol_type = other DNA

SEQ ID NO: 80909 - DNA, 80 bp, synthetic construct; identical to SEQ ID NO: 47457
  source 1..80: mol_type = other DNA

SEQ ID NO: 80910 - DNA, 80 bp, synthetic construct; identical to SEQ ID NO: 47458
  source 1..80: mol_type = other DNA

SEQ ID NO: 80911 - DNA, 80 bp, synthetic construct; identical to SEQ ID NO: 15724
  source 1..80: mol_type = other DNA

SEQ ID NO: 80912 - DNA, 80 bp, synthetic construct; identical to SEQ ID NO: 47460
  source 1..80: mol_type = other DNA

SEQ ID NO: 80913 - DNA, 80 bp, synthetic construct; identical to SEQ ID NO: 47462
  source 1..80: mol_type = other DNA

SEQ ID NO: 80914 - DNA, 80 bp, synthetic construct; identical to SEQ ID NO: 15725
  source 1..80: mol_type = other DNA

SEQ ID NO: 80915 - DNA, 80 bp, synthetic construct; identical to SEQ ID NO: 47464
  source 1..80: mol_type = other DNA

SEQ ID NO: 80916 - DNA, 80 bp, synthetic construct; identical to SEQ ID NO: 47465
  source 1..80: mol_type = other DNA

SEQ ID NO: 80917 - DNA, 80 bp, synthetic construct; identical to SEQ ID NO: 47466
  source 1..80: mol_type = other DNA

SEQ ID NO: 80918 - DNA, 80 bp, synthetic construct; identical to SEQ ID NO: 15726
  source 1..80: mol_type = other DNA

SEQ ID NO: 80919 - DNA, 80 bp, synthetic construct; identical to SEQ ID NO: 47469
  source 1..80: mol_type = other DNA

SEQ ID NO: 80920 - DNA, 80 bp, synthetic construct; identical to SEQ ID NO: 47470
  source 1..80: mol_type = other DNA

SEQ ID NO: 80921 - DNA, 80 bp, synthetic construct; identical to SEQ ID NO: 15727
  source 1..80: mol_type = other DNA

SEQ ID NO: 80922 - DNA, 80 bp, synthetic construct; identical to SEQ ID NO: 47472
  source 1..80: mol_type = other DNA

SEQ ID NO: 80923 - DNA, 80 bp, synthetic construct; identical to SEQ ID NO: 47473
  source 1..80: mol_type = other DNA

SEQ ID NO: 80924 - DNA, 80 bp, synthetic construct; identical to SEQ ID NO: 15728
  source 1..80: mol_type = other DNA

SEQ ID NO: 80925 - DNA, 80 bp, synthetic construct; identical to SEQ ID NO: 47476
  source 1..80: mol_type = other DNA

SEQ ID NO: 80926 - DNA, 80 bp, synthetic construct; identical to SEQ ID NO: 47477
  source 1..80: mol_type = other DNA

SEQ ID NO: 80927 - DNA, 80 bp, synthetic construct; identical to SEQ ID NO: 47478
  source 1..80: mol_type = other DNA

SEQ ID NO: 80928 - DNA, 80 bp, synthetic construct; identical to SEQ ID NO: 15729
  source 1..80: mol_type = other DNA

SEQ ID NO: 80929 - DNA, 80 bp, synthetic construct; identical to SEQ ID NO: 47480
  source 1..80: mol_type = other DNA

SEQ ID NO: 80930 - DNA, 80 bp, synthetic construct; identical to SEQ ID NO: 47482
  source 1..80: mol_type = other DNA

SEQ ID NO: 80931 - DNA, 80 bp, synthetic construct; identical to SEQ ID NO: 47483
  source 1..80: mol_type = other DNA

SEQ ID NO: 80932 - DNA, 80 bp, synthetic construct; identical to SEQ ID NO: 15730
  source 1..80: mol_type = other DNA

SEQ ID NO: 80933 - DNA, 80 bp, synthetic construct; identical to SEQ ID NO: 47485
  source 1..80: mol_type = other DNA

SEQ ID NO: 80934 - DNA, 80 bp, synthetic construct; identical to SEQ ID NO: 47486
  source 1..80: mol_type = other DNA

SEQ ID NO: 80935 - DNA, 80 bp, synthetic construct; identical to SEQ ID NO: 47487
  source 1..80: mol_type = other DNA

SEQ ID NO: 80936 - DNA, 80 bp, synthetic construct; identical to SEQ ID NO: 15731
  source 1..80: mol_type = other DNA

SEQ ID NO: 80937 - DNA, 80 bp, synthetic construct; identical to SEQ ID NO: 47489
  source 1..80: mol_type = other DNA

SEQ ID NO: 80938 - DNA, 80 bp, synthetic construct; identical to SEQ ID NO: 47490
  source 1..80: mol_type = other DNA

SEQ ID NO: 80939 - DNA, 80 bp, synthetic construct; identical to SEQ ID NO: 15732
  source 1..80: mol_type = other DNA

SEQ ID NO: 80940 - DNA, 80 bp, synthetic construct; identical to SEQ ID NO: 47492
  source 1..80: mol_type = other DNA

SEQ ID NO: 80941 - DNA, 80 bp, synthetic construct; identical to SEQ ID NO: 47493
  source 1..80: mol_type = other DNA

SEQ ID NO: 80942 - DNA, 80 bp, synthetic construct; identical to SEQ ID NO: 47494
  source 1..80: mol_type = other DNA

SEQ ID NO: 80943 - DNA, 80 bp, synthetic construct; identical to SEQ ID NO: 47495
  source 1..80: mol_type = other DNA

SEQ ID NO: 80944 - DNA, 80 bp, synthetic construct; identical to SEQ ID NO: 15733
  source 1..80: mol_type = other DNA

SEQ ID NO: 80945 - DNA, 80 bp, synthetic construct; identical to SEQ ID NO: 47497
  source 1..80: mol_type = other DNA

SEQ ID NO: 80946 - DNA, 80 bp, synthetic construct; identical to SEQ ID NO: 47498
  source 1..80: mol_type = other DNA

SEQ ID NO: 80947 - DNA, 80 bp, synthetic construct; identical to SEQ ID NO: 15734
  source 1..80: mol_type = other DNA

SEQ ID NO: 80948 - DNA, 80 bp, synthetic construct; identical to SEQ ID NO: 47501
  source 1..80: mol_type = other DNA

SEQ ID NO: 80949 - DNA, 80 bp, synthetic construct; identical to SEQ ID NO: 47502
  source 1..80: mol_type = other DNA

SEQ ID NO: 80950 - DNA, 80 bp, synthetic construct; identical to SEQ ID NO: 15735
  source 1..80: mol_type = other DNA

SEQ ID NO: 80951 - DNA, 80 bp, synthetic construct; identical to SEQ ID NO: 47504
  source 1..80: mol_type = other DNA

SEQ ID NO: 80952 - DNA, 80 bp, synthetic construct; identical to SEQ ID NO: 47506
  source 1..80: mol_type = other DNA

SEQ ID NO: 80953 - DNA, 80 bp, synthetic construct; identical to SEQ ID NO: 47507
  source 1..80: mol_type = other DNA

SEQ ID NO: 80954 - DNA, 80 bp, synthetic construct; identical to SEQ ID NO: 15736
  source 1..80: mol_type = other DNA

SEQ ID NO: 80955 - DNA, 80 bp, synthetic construct; identical to SEQ ID NO: 47509
  source 1..80: mol_type = other DNA

SEQ ID NO: 80956 - DNA, 80 bp, synthetic construct; identical to SEQ ID NO: 47511
  source 1..80: mol_type = other DNA

SEQ ID NO: 80957 - DNA, 80 bp, synthetic construct; identical to SEQ ID NO: 15737
  source 1..80: mol_type = other DNA

SEQ ID NO: 80958 - DNA, 80 bp, synthetic construct; identical to SEQ ID NO: 47513
  source 1..80: mol_type = other DNA

SEQ ID NO: 80959 - DNA, 80 bp, synthetic construct; identical to SEQ ID NO: 47514
  source 1..80: mol_type = other DNA

SEQ ID NO: 80960 - DNA, 80 bp, synthetic construct; identical to SEQ ID NO: 15738
  source 1..80: mol_type = other DNA

SEQ ID NO: 80961 - DNA, 80 bp, synthetic construct; identical to SEQ ID NO: 47517
  source 1..80: mol_type = other DNA

SEQ ID NO: 80962 - DNA, 80 bp, synthetic construct; identical to SEQ ID NO: 47518
  source 1..80: mol_type = other DNA

SEQ ID NO: 80963 - DNA, 80 bp, synthetic construct; identical to SEQ ID NO: 15739
  source 1..80: mol_type = other DNA

SEQ ID NO: 80964 - DNA, 80 bp, synthetic construct; identical to SEQ ID NO: 47520
  source 1..80: mol_type = other DNA

SEQ ID NO: 80965 - DNA, 80 bp, synthetic construct; identical to SEQ ID NO: 47521
  source 1..80: mol_type = other DNA

SEQ ID NO: 80966 - DNA, 80 bp, synthetic construct; identical to SEQ ID NO: 47522
  source 1..80: mol_type = other DNA

SEQ ID NO: 80967 - DNA, 80 bp, synthetic construct; identical to SEQ ID NO: 15740
  source 1..80: mol_type = other DNA

SEQ ID NO: 80968 - DNA, 80 bp, synthetic construct; identical to SEQ ID NO: 47524
  source 1..80: mol_type = other DNA

SEQ ID NO: 80969 - DNA, 80 bp, synthetic construct; identical to SEQ ID NO: 47525
  source 1..80: mol_type = other DNA

SEQ ID NO: 80970 - DNA, 80 bp, synthetic construct; identical to SEQ ID NO: 47526
  source 1..80: mol_type = other DNA

SEQ ID NO: 80971 - DNA, 80 bp, synthetic construct; identical to SEQ ID NO: 15741
  source 1..80: mol_type = other DNA

SEQ ID NO: 80972 - DNA, 80 bp, synthetic construct; identical to SEQ ID NO: 47529
  source 1..80: mol_type = other DNA

SEQ ID NO: 80973 - DNA, 80 bp, synthetic construct; identical to SEQ ID NO: 47530
  source 1..80: mol_type = other DNA

SEQ ID NO: 80974 - DNA, 80 bp, synthetic construct; identical to SEQ ID NO: 15742
  source 1..80: mol_type = other DNA

SEQ ID NO: 80975 - DNA, 80 bp, synthetic construct; identical to SEQ ID NO: 47533
  source 1..80: mol_type = other DNA

SEQ ID NO: 80976 - DNA, 80 bp, synthetic construct; identical to SEQ ID NO: 47534
  source 1..80: mol_type = other DNA

SEQ ID NO: 80977 - DNA, 80 bp, synthetic construct; identical to SEQ ID NO: 47535
  source 1..80: mol_type = other DNA

SEQ ID NO: 80978 - DNA, 80 bp, synthetic construct; identical to SEQ ID NO: 15743
  source 1..80: mol_type = other DNA

SEQ ID NO: 80979 - DNA, 80 bp, synthetic construct; identical to SEQ ID NO: 47538
  source 1..80: mol_type = other DNA

SEQ ID NO: 80980 - DNA, 80 bp, synthetic construct; identical to SEQ ID NO: 47539
  source 1..80: mol_type = other DNA

SEQ ID NO: 80981 - DNA, 80 bp, synthetic construct; identical to SEQ ID NO: 15744
  source 1..80: mol_type = other DNA

SEQ ID NO: 80982 - DNA, 80 bp, synthetic construct; identical to SEQ ID NO: 47541
  source 1..80: mol_type = other DNA

SEQ ID NO: 80983 - DNA, 80 bp, synthetic construct; identical to SEQ ID NO: 47542
  source 1..80: mol_type = other DNA

SEQ ID NO: 80984 - DNA, 80 bp, synthetic construct; identical to SEQ ID NO: 47543
  source 1..80: mol_type = other DNA

SEQ ID NO: 80985 - DNA, 80 bp, synthetic construct; identical to SEQ ID NO: 15745
  source 1..80: mol_type = other DNA

SEQ ID NO: 80986 - DNA, 80 bp, synthetic construct; identical to SEQ ID NO: 47545
  source 1..80: mol_type = other DNA

SEQ ID NO: 80987 - DNA, 80 bp, synthetic construct; identical to SEQ ID NO: 47546
  source 1..80: mol_type = other DNA

SEQ ID NO: 80988 - DNA, 80 bp, synthetic construct; identical to SEQ ID NO: 47547
  source 1..80: mol_type = other DNA

SEQ ID NO: 80989 - DNA, 80 bp, synthetic construct; identical to SEQ ID NO: 15746
  source 1..80: mol_type = other DNA

SEQ ID NO: 80990 - DNA, 80 bp, synthetic construct; identical to SEQ ID NO: 47549
  source 1..80: mol_type = other DNA

SEQ ID NO: 80991 - DNA, 80 bp, synthetic construct; identical to SEQ ID NO: 47550
  source 1..80: mol_type = other DNA

SEQ ID NO: 80992 - DNA, 80 bp, synthetic construct; identical to SEQ ID NO: 15747
  source 1..80: mol_type = other DNA

SEQ ID NO: 80993 - DNA, 80 bp, synthetic construct; identical to SEQ ID NO: 47552
  source 1..80: mol_type = other DNA

SEQ ID NO: 80994 - DNA, 80 bp, synthetic construct; identical to SEQ ID NO: 47553
  source 1..80: mol_type = other DNA

SEQ ID NO: 80995 - DNA, 80 bp, synthetic construct; identical to SEQ ID NO: 47554
  source 1..80: mol_type = other DNA

SEQ ID NO: 80996 - DNA, 80 bp, synthetic construct; identical to SEQ ID NO: 15748
  source 1..80: mol_type = other DNA

SEQ ID NO: 80997 - DNA, 80 bp, synthetic construct; identical to SEQ ID NO: 47556
  source 1..80: mol_type = other DNA

SEQ ID NO: 80998 - DNA, 80 bp, synthetic construct; identical to SEQ ID NO: 47557
  source 1..80: mol_type = other DNA

SEQ ID NO: 80999 - DNA, 80 bp, synthetic construct; identical to SEQ ID NO: 47558
  source 1..80: mol_type = other DNA

SEQ ID NO: 81000 - DNA, 80 bp, synthetic construct; identical to SEQ ID NO: 15749
  source 1..80: mol_type = other DNA

SEQ ID NO: 81001 - DNA, 80 bp, synthetic construct; identical to SEQ ID NO: 47560
  source 1..80: mol_type = other DNA

SEQ ID NO: 81002 - DNA, 80 bp, synthetic construct; identical to SEQ ID NO: 47561
  source 1..80: mol_type = other DNA

SEQ ID NO: 81003 - DNA, 80 bp, synthetic construct; identical to SEQ ID NO: 47562
  source 1..80: mol_type = other DNA

SEQ ID NO: 81004 - DNA, 80 bp, synthetic construct; identical to SEQ ID NO: 15750
  source 1..80: mol_type = other DNA

SEQ ID NO: 81005 - DNA, 80 bp, synthetic construct; identical to SEQ ID NO: 47565
  source 1..80: mol_type = other DNA

SEQ ID NO: 81006 - DNA, 80 bp, synthetic construct; identical to SEQ ID NO: 47566
  source 1..80: mol_type = other DNA

SEQ ID NO: 81007 - DNA, 80 bp, synthetic construct; identical to SEQ ID NO: 47567
  source 1..80: mol_type = other DNA

SEQ ID NO: 81008 - DNA, 80 bp, synthetic construct; identical to SEQ ID NO: 15751
  source 1..80: mol_type = other DNA

SEQ ID NO: 81009 - DNA, 80 bp, synthetic construct; identical to SEQ ID NO: 47569
  source 1..80: mol_type = other DNA

SEQ ID NO: 81010 - DNA, 80 bp, synthetic construct; identical to SEQ ID NO: 47570
  source 1..80: mol_type = other DNA

SEQ ID NO: 81011 - DNA, 80 bp, synthetic construct; identical to SEQ ID NO: 47571
  source 1..80: mol_type = other DNA

SEQ ID NO: 81012 - DNA, 80 bp, synthetic construct; identical to SEQ ID NO: 15752
  source 1..80: mol_type = other DNA

SEQ ID NO: 81013 - DNA, 80 bp, synthetic construct; identical to SEQ ID NO: 47573
  source 1..80: mol_type = other DNA

SEQ ID NO: 81014 - DNA, 80 bp, synthetic construct; identical to SEQ ID NO: 15753
  source 1..80: mol_type = other DNA

SEQ ID NO: 81015 - DNA, 80 bp, synthetic construct; identical to SEQ ID NO: 47576
  source 1..80: mol_type = other DNA

SEQ ID NO: 81016 - DNA, 80 bp, synthetic construct; identical to SEQ ID NO: 47577
  source 1..80: mol_type = other DNA

SEQ ID NO: 81017 - DNA, 80 bp, synthetic construct; identical to SEQ ID NO: 47578
  source 1..80: mol_type = other DNA

SEQ ID NO: 81018 - DNA, 80 bp, synthetic construct; identical to SEQ ID NO: 15754
  source 1..80: mol_type = other DNA

SEQ ID NO: 81019 - DNA, 80 bp, synthetic construct; identical to SEQ ID NO: 47580
  source 1..80: mol_type = other DNA

SEQ ID NO: 81020 - DNA, 80 bp, synthetic construct; identical to SEQ ID NO: 47581
  source 1..80: mol_type = other DNA

SEQ ID NO: 81021 - DNA, 80 bp, synthetic construct; identical to SEQ ID NO: 47582
  source 1..80: mol_type = other DNA

SEQ ID NO: 81022 - DNA, 80 bp, synthetic construct; identical to SEQ ID NO: 15755
  source 1..80: mol_type = other DNA

SEQ ID NO: 81023 - DNA, 80 bp, synthetic construct; identical to SEQ ID NO: 47584
  source 1..80: mol_type = other DNA

SEQ ID NO: 81024 - DNA, 80 bp, synthetic construct; identical to SEQ ID NO: 47585
  source 1..80: mol_type = other DNA

SEQ ID NO: 81025 - DNA, 80 bp, synthetic construct; identical to SEQ ID NO: 47586
  source 1..80: mol_type = other DNA

SEQ ID NO: 81026 - DNA, 80 bp, synthetic construct; identical to SEQ ID NO: 47587
  source 1..80: mol_type = other DNA

SEQ ID NO: 81027 - DNA, 80 bp, synthetic construct; identical to SEQ ID NO: 15756
  source 1..80: mol_type = other DNA

SEQ ID NO: 81028 - DNA, 80 bp, synthetic construct; identical to SEQ ID NO: 47589
  source 1..80: mol_type = other DNA

SEQ ID NO: 81029 - DNA, 80 bp, synthetic construct; identical to SEQ ID NO: 47590
  source 1..80: mol_type = other DNA

SEQ ID NO: 81030 - DNA, 80 bp, synthetic construct; identical to SEQ ID NO: 47591
  source 1..80: mol_type = other DNA

SEQ ID NO: 81031 - DNA, 80 bp, synthetic construct; identical to SEQ ID NO: 15757
  source 1..80: mol_type = other DNA

SEQ ID NO: 81032 - DNA, 80 bp, synthetic construct; identical to SEQ ID NO: 47593
  source 1..80: mol_type = other DNA

SEQ ID NO: 81033 - DNA, 80 bp, synthetic construct; identical to SEQ ID NO: 47594
  source 1..80: mol_type = other DNA

SEQ ID NO: 81034 - DNA, 80 bp, synthetic construct; identical to SEQ ID NO: 15758
  source 1..80: mol_type = other DNA

SEQ ID NO: 81035 - DNA, 80 bp, synthetic construct; identical to SEQ ID NO: 47597
  source 1..80: mol_type = other DNA

SEQ ID NO: 81036 - DNA, 80 bp, synthetic construct; identical to SEQ ID NO: 47598
  source 1..80: mol_type = other DNA

SEQ ID NO: 81037 - DNA, 80 bp, synthetic construct; identical to SEQ ID NO: 15759
  source 1..80: mol_type = other DNA

SEQ ID NO: 81038 - DNA, 80 bp, synthetic construct; identical to SEQ ID NO: 47602
  source 1..80: mol_type = other DNA

SEQ ID NO: 81039 - DNA, 80 bp, synthetic construct; identical to SEQ ID NO: 15760
  source 1..80: mol_type = other DNA

SEQ ID NO: 81040 - DNA, 80 bp, synthetic construct; identical to SEQ ID NO: 47605
  source 1..80: mol_type = other DNA

SEQ ID NO: 81041 - DNA, 80 bp, synthetic construct; identical to SEQ ID NO: 47606
  source 1..80: mol_type = other DNA

SEQ ID NO: 81042 - DNA, 80 bp, synthetic construct; identical to SEQ ID NO: 15761
  source 1..80: mol_type = other DNA

SEQ ID NO: 81043 - DNA, 80 bp, synthetic construct; identical to SEQ ID NO: 47609
  source 1..80: mol_type = other DNA

SEQ ID NO: 81044 - DNA, 80 bp, synthetic construct; identical to SEQ ID NO: 47610
  source 1..80: mol_type = other DNA

SEQ ID NO: 81045 - DNA, 80 bp, synthetic construct; identical to SEQ ID NO: 47611
  source 1..80: mol_type = other DNA

SEQ ID NO: 81046 - DNA, 80 bp, synthetic construct; identical to SEQ ID NO: 15762
  source 1..80: mol_type = other DNA

SEQ ID NO: 81047 - DNA, 80 bp, synthetic construct; identical to SEQ ID NO: 47613
  source 1..80: mol_type = other DNA

SEQ ID NO: 81048 - DNA, 80 bp, synthetic construct; identical to SEQ ID NO: 47614
  source 1..80: mol_type = other DNA

SEQ ID NO: 81049 - DNA, 80 bp, synthetic construct; identical to SEQ ID NO: 15763
  source 1..80: mol_type = other DNA

SEQ ID NO: 81050 - DNA, 80 bp, synthetic construct; identical to SEQ ID NO: 47616
  source 1..80: mol_type = other DNA

SEQ ID NO: 81051 - DNA, 80 bp, synthetic construct; identical to SEQ ID NO: 47618
  source 1..80: mol_type = other DNA

SEQ ID NO: 81052 - DNA, 80 bp, synthetic construct; identical to SEQ ID NO: 15764
  source 1..80: mol_type = other DNA

SEQ ID NO: 81053 - DNA, 80 bp, synthetic construct; identical to SEQ ID NO: 47620
  source 1..80: mol_type = other DNA

SEQ ID NO: 81054 - DNA, 80 bp, synthetic construct; identical to SEQ ID NO: 47621
  source 1..80: mol_type = other DNA

SEQ ID NO: 81055 - DNA, 80 bp, synthetic construct; identical to SEQ ID NO: 47623
  source 1..80: mol_type = other DNA

SEQ ID NO: 81056 - DNA, 80 bp, synthetic construct; identical to SEQ ID NO: 15765
  source 1..80: mol_type = other DNA

SEQ ID NO: 81057 - DNA, 80 bp, synthetic construct; identical to SEQ ID NO: 47625
  source 1..80: mol_type = other DNA

SEQ ID NO: 81058 - DNA, 80 bp, synthetic construct; identical to SEQ ID NO: 47626
  source 1..80: mol_type = other DNA

SEQ ID NO: 81059 - DNA, 80 bp, synthetic construct; identical to SEQ ID NO: 15766
  source 1..80: mol_type = other DNA

SEQ ID NO: 81060 - DNA, 80 bp, synthetic construct; identical to SEQ ID NO: 47628
  source 1..80: mol_type = other DNA

SEQ ID NO: 81061 - DNA, 80 bp, synthetic construct; identical to SEQ ID NO: 47629
  source 1..80: mol_type = other DNA

SEQ ID NO: 81062 - DNA, 80 bp, synthetic construct; identical to SEQ ID NO: 47630
  source 1..80: mol_type = other DNA

SEQ ID NO: 81063 - DNA, 80 bp, synthetic construct; identical to SEQ ID NO: 47631
  source 1..80: mol_type = other DNA

SEQ ID NO: 81064 - DNA, 80 bp, synthetic construct; identical to SEQ ID NO: 15767
  source 1..80: mol_type = other DNA

SEQ ID NO: 81065 - DNA, 80 bp, synthetic construct; identical to SEQ ID NO: 47633
  source 1..80: mol_type = other DNA

SEQ ID NO: 81066 - DNA, 80 bp, synthetic construct; identical to SEQ ID NO: 47634
  source 1..80: mol_type = other DNA

SEQ ID NO: 81067 - DNA, 80 bp, synthetic construct; identical to SEQ ID NO: 15768
  source 1..80: mol_type = other DNA

SEQ ID NO: 81068 - DNA, 80 bp, synthetic construct; identical to SEQ ID NO: 47636
  source 1..80: mol_type = other DNA

SEQ ID NO: 81069 - DNA, 80 bp, synthetic construct; identical to SEQ ID NO: 47637
  source 1..80: mol_type = other DNA

SEQ ID NO: 81070 - DNA, 80 bp, synthetic construct; identical to SEQ ID NO: 15769
  source 1..80: mol_type = other DNA

SEQ ID NO: 81071 - DNA, 80 bp, synthetic construct; identical to SEQ ID NO: 47640
  source 1..80: mol_type = other DNA

SEQ ID NO: 81072 - DNA, 80 bp, synthetic construct; identical to SEQ ID NO: 47641
  source 1..80: mol_type = other DNA

SEQ ID NO: 81073 - DNA, 80 bp, synthetic construct; identical to SEQ ID NO: 15770
  source 1..80: mol_type = other DNA

SEQ ID NO: 81074 - DNA, 80 bp, synthetic construct; identical to SEQ ID NO: 47644
  source 1..80: mol_type = other DNA

SEQ ID NO: 81075 - DNA, 80 bp, synthetic construct; identical to SEQ ID NO: 47645
  source 1..80: mol_type = other DNA

SEQ ID NO: 81076 - DNA, 80 bp, synthetic construct; identical to SEQ ID NO: 47647
  source 1..80: mol_type = other DNA

SEQ ID NO: 81077 - DNA, 80 bp, synthetic construct; identical to SEQ ID NO: 15771
  source 1..80: mol_type = other DNA

SEQ ID NO: 81078 - DNA, 80 bp, synthetic construct; identical to SEQ ID NO: 47649
  source 1..80: mol_type = other DNA

SEQ ID NO: 81079 - DNA, 80 bp, synthetic construct; identical to SEQ ID NO: 47650
  source 1..80: mol_type = other DNA

SEQ ID NO: 81080 - DNA, 80 bp, synthetic construct; identical to SEQ ID NO: 15772
  source 1..80: mol_type = other DNA

SEQ ID NO: 81081 - DNA, 80 bp, synthetic construct; identical to SEQ ID NO: 47652
  source 1..80: mol_type = other DNA

SEQ ID NO: 81082 - DNA, 80 bp, synthetic construct; identical to SEQ ID NO: 47653
  source 1..80: mol_type = other DNA

SEQ ID NO: 81083 - DNA, 80 bp, synthetic construct; identical to SEQ ID NO: 47654
  source 1..80: mol_type = other DNA

SEQ ID NO: 81084 - DNA, 80 bp, synthetic construct; identical to SEQ ID NO: 15773
  source 1..80: mol_type = other DNA

SEQ ID NO: 81085 - DNA, 80 bp, synthetic construct; identical to SEQ ID NO: 47657
  source 1..80: mol_type = other DNA

SEQ ID NO: 81086 - DNA, 80 bp, synthetic construct; identical to SEQ ID NO: 47658
  source 1..80: mol_type = other DNA

SEQ ID NO: 81087 - DNA, 80 bp, synthetic construct; identical to SEQ ID NO: 15774
  source 1..80: mol_type = other DNA

SEQ ID NO: 81088 - DNA, 80 bp, synthetic construct; identical to SEQ ID NO: 47660
  source 1..80: mol_type = other DNA

SEQ ID NO: 81089 - DNA, 80 bp, synthetic construct; identical to SEQ ID NO: 47661
  source 1..80: mol_type = other DNA

SEQ ID NO: 81090 - DNA, 80 bp, synthetic construct; identical to SEQ ID NO: 47662
  source 1..80: mol_type = other DNA

SEQ ID NO: 81091 - DNA, 80 bp, synthetic construct; identical to SEQ ID NO: 15775
  source 1..80: mol_type = other DNA

SEQ ID NO: 81092 - DNA, 80 bp, synthetic construct; identical to SEQ ID NO: 47664
  source 1..80: mol_type = other DNA

SEQ ID NO: 81093 - DNA, 80 bp, synthetic construct; identical to SEQ ID NO: 47665
  source 1..80: mol_type = other DNA

SEQ ID NO: 81094 - DNA, 80 bp, synthetic construct; identical to SEQ ID NO: 47666
  source 1..80: mol_type = other DNA

SEQ ID NO: 81095 - DNA, 80 bp, synthetic construct; identical to SEQ ID NO: 15776
  source 1..80: mol_type = other DNA

SEQ ID NO: 81096 - DNA, 80 bp, synthetic construct; identical to SEQ ID NO: 47668
  source 1..80: mol_type = other DNA

SEQ ID NO: 81097 - DNA, 80 bp, synthetic construct; identical to SEQ ID NO: 47669
  source 1..80: mol_type = other DNA

SEQ ID NO: 81098 - DNA, 80 bp, synthetic construct; identical to SEQ ID NO: 47670
  source 1..80: mol_type = other DNA

SEQ ID NO: 81099 - DNA, 80 bp, synthetic construct; identical to SEQ ID NO: 15777
  source 1..80: mol_type = other DNA

SEQ ID NO: 81100 - DNA, 80 bp, synthetic construct; identical to SEQ ID NO: 47672
  source 1..80: mol_type = other DNA

SEQ ID NO: 81101 - DNA, 80 bp, synthetic construct; identical to SEQ ID NO: 47673
  source 1..80: mol_type = other DNA

SEQ ID NO: 81102 - DNA, 80 bp, synthetic construct; identical to SEQ ID NO: 47674
  source 1..80: mol_type = other DNA

SEQ ID NO: 81103 - DNA, 80 bp, synthetic construct; identical to SEQ ID NO: 47675
  source 1..80: mol_type = other DNA

SEQ ID NO: 81104 - DNA, 80 bp, synthetic construct; identical to SEQ ID NO: 15778
  source 1..80: mol_type = other DNA

SEQ ID NO: 81105 - DNA, 80 bp, synthetic construct; identical to SEQ ID NO: 47677
  source 1..80: mol_type = other DNA

SEQ ID NO: 81106 - DNA, 80 bp, synthetic construct; identical to SEQ ID NO: 15779
  source 1..80: mol_type = other DNA

SEQ ID NO: 81107 - DNA, 80 bp, synthetic construct; identical to SEQ ID NO: 47680
  source 1..80: mol_type = other DNA

SEQ ID NO: 81108 - DNA, 80 bp, synthetic construct; identical to SEQ ID NO: 47681
  source 1..80: mol_type = other DNA

SEQ ID NO: 81109 - DNA, 80 bp, synthetic construct; identical to SEQ ID NO: 47682
  source 1..80: mol_type = other DNA

SEQ ID NO: 81110 - DNA, 80 bp, synthetic construct; identical to SEQ ID NO: 47683
  source 1..80: mol_type = other DNA

SEQ ID NO: 81111 - DNA, 80 bp, synthetic construct; identical to SEQ ID NO: 15780
  source 1..80: mol_type = other DNA

SEQ ID NO: 81112 - DNA, 80 bp, synthetic construct; identical to SEQ ID NO: 47685
  source 1..80: mol_type = other DNA

SEQ ID NO: 81113 - DNA, 80 bp, synthetic construct; identical to SEQ ID NO: 47686
  source 1..80: mol_type = other DNA

SEQ ID NO: 81114 - DNA, 80 bp, synthetic construct; identical to SEQ ID NO: 15781
  source 1..80: mol_type = other DNA

SEQ ID NO: 81115 - DNA, 80 bp, synthetic construct; identical to SEQ ID NO: 47688
  source 1..80: mol_type = other DNA

SEQ ID NO: 81116 - DNA, 80 bp, synthetic construct; identical to SEQ ID NO: 47689
  source 1..80: mol_type = other DNA

SEQ ID NO: 81117 - DNA, 80 bp, synthetic construct; identical to SEQ ID NO: 47690
  source 1..80: mol_type = other DNA

SEQ ID NO: 81118 - DNA, 80 bp, synthetic construct; identical to SEQ ID NO: 15782
  source 1..80: mol_type = other DNA

SEQ ID NO: 81119 - DNA, 80 bp, synthetic construct; identical to SEQ ID NO: 47693
  source 1..80: mol_type = other DNA

SEQ ID NO: 81120 - DNA, 80 bp, synthetic construct; identical to SEQ ID NO: 15783
  source 1..80: mol_type = other DNA

SEQ ID NO: 81121 - DNA, 80 bp, synthetic construct; identical to SEQ ID NO: 47696
  source 1..80: mol_type = other DNA

SEQ ID NO: 81122 - DNA, 80 bp, synthetic construct; identical to SEQ ID NO: 47697
  source 1..80: mol_type = other DNA

SEQ ID NO: 81123 - DNA, 80 bp, synthetic construct; identical to SEQ ID NO: 47698
  source 1..80: mol_type = other DNA

SEQ ID NO: 81124 - DNA, 80 bp, synthetic construct; identical to SEQ ID NO: 15784
  source 1..80: mol_type = other DNA

SEQ ID NO: 81125 - DNA, 80 bp, synthetic construct; identical to SEQ ID NO: 47701
  source 1..80: mol_type = other DNA

SEQ ID NO: 81126 - DNA, 80 bp, synthetic construct; identical to SEQ ID NO: 47702
  source 1..80: mol_type = other DNA

SEQ ID NO: 81127 - DNA, 80 bp, synthetic construct; identical to SEQ ID NO: 47703
  source 1..80: mol_type = other DNA

SEQ ID NO: 81128 - DNA, 80 bp, synthetic construct; identical to SEQ ID NO: 15785
  source 1..80: mol_type = other DNA

SEQ ID NO: 81129 - DNA, 80 bp, synthetic construct; identical to SEQ ID NO: 47705
  source 1..80: mol_type = other DNA

SEQ ID NO: 81130 - DNA, 80 bp, synthetic construct; identical to SEQ ID NO: 47707
  source 1..80: mol_type = other DNA

SEQ ID NO: 81131 - DNA, 80 bp, synthetic construct; identical to SEQ ID NO: 15786
  source 1..80: mol_type = other DNA

SEQ ID NO: 81132 - DNA, 80 bp, synthetic construct; identical to SEQ ID NO: 47710
  source 1..80: mol_type = other DNA

SEQ ID NO: 81133 - DNA, 80 bp, synthetic construct; identical to SEQ ID NO: 15787
  source 1..80: mol_type = other DNA

SEQ ID NO: 81134 - DNA, 80 bp, synthetic construct; identical to SEQ ID NO: 47712
  source 1..80: mol_type = other DNA

SEQ ID NO: 81135 - DNA, 80 bp, synthetic construct; identical to SEQ ID NO: 47713
  source 1..80: mol_type = other DNA

SEQ ID NO: 81136 - DNA, 80 bp, synthetic construct; identical to SEQ ID NO: 47714
  source 1..80: mol_type = other DNA

SEQ ID NO: 81137 - DNA, 80 bp, synthetic construct; identical to SEQ ID NO: 47715
  source 1..80: mol_type = other DNA

SEQ ID NO: 81138 - DNA, 80 bp, synthetic construct; identical to SEQ ID NO: 15788
  source 1..80: mol_type = other DNA

SEQ ID NO: 81139 - DNA, 80 bp, synthetic construct; identical to SEQ ID NO: 47717
  source 1..80: mol_type = other DNA

SEQ ID NO: 81140 - DNA, 80 bp, synthetic construct; identical to SEQ ID NO: 47718
  source 1..80: mol_type = other DNA

SEQ ID NO: 81141 - DNA, 80 bp, synthetic construct; identical to SEQ ID NO: 15789
  source 1..80: mol_type = other DNA

SEQ ID NO: 81142 - DNA, 80 bp, synthetic construct; identical to SEQ ID NO: 47720
  source 1..80: mol_type = other DNA

SEQ ID NO: 81143 - DNA, 80 bp, synthetic construct; identical to SEQ ID NO: 47721
  source 1..80: mol_type = other DNA

SEQ ID NO: 81144 - DNA, 80 bp, synthetic construct; identical to SEQ ID NO: 47722
  source 1..80: mol_type = other DNA

SEQ ID NO: 81145 - DNA, 80 bp, synthetic construct; identical to SEQ ID NO: 15790
  source 1..80: mol_type = other DNA

SEQ ID NO: 81146 - DNA, 80 bp, synthetic construct; identical to SEQ ID NO: 47724
  source 1..80: mol_type = other DNA

SEQ ID NO: 81147 - DNA, 80 bp, synthetic construct; identical to SEQ ID NO: 47725
  source 1..80: mol_type = other DNA

SEQ ID NO: 81148 - DNA, 80 bp, synthetic construct; identical to SEQ ID NO: 15791
  source 1..80: mol_type = other DNA

SEQ ID NO: 81149 - DNA, 80 bp, synthetic construct; identical to SEQ ID NO: 47728
  source 1..80: mol_type = other DNA

SEQ ID NO: 81150 - DNA, 80 bp, synthetic construct; identical to SEQ ID NO: 47729
  source 1..80: mol_type = other DNA

SEQ ID NO: 81151 - DNA, 80 bp, synthetic construct; identical to SEQ ID NO: 47730
  source 1..80: mol_type = other DNA

SEQ ID NO: 81152 - DNA, 80 bp, synthetic construct; identical to SEQ ID NO: 15792
  source 1..80: mol_type = other DNA

SEQ ID NO: 81153 - DNA, 80 bp, synthetic construct; identical to SEQ ID NO: 47732
  source 1..80: mol_type = other DNA

SEQ ID NO: 81154 - DNA, 80 bp, synthetic construct; identical to SEQ ID NO: 47733
  source 1..80: mol_type = other DNA

SEQ ID NO: 81155 - DNA, 80 bp, synthetic construct; identical to SEQ ID NO: 47734
  source 1..80: mol_type = other DNA

SEQ ID NO: 81156 - DNA, 80 bp, synthetic construct; identical to SEQ ID NO: 15793
  source 1..80: mol_type = other DNA

SEQ ID NO: 81157 - DNA, 80 bp, synthetic construct; identical to SEQ ID NO: 47736
  source 1..80: mol_type = other DNA

SEQ ID NO: 81158 - DNA, 80 bp, synthetic construct; identical to SEQ ID NO: 47737
  source 1..80: mol_type = other DNA

SEQ ID NO: 81159 - DNA, 80 bp, synthetic construct; identical to SEQ ID NO: 47738
  source 1..80: mol_type = other DNA

SEQ ID NO: 81160 - DNA, 80 bp, synthetic construct; identical to SEQ ID NO: 15794
  source 1..80: mol_type = other DNA

SEQ ID NO: 81161 - DNA, 80 bp, synthetic construct; identical to SEQ ID NO: 47741
  source 1..80: mol_type = other DNA

SEQ ID NO: 81162 - DNA, 80 bp, synthetic construct; identical to SEQ ID NO: 47742
  source 1..80: mol_type = other DNA

SEQ ID NO: 81163 - DNA, 80 bp, synthetic construct; identical to SEQ ID NO: 47743
  source 1..80: mol_type = other DNA

SEQ ID NO: 81164 - DNA, 80 bp, synthetic construct; identical to SEQ ID NO: 15795
  source 1..80: mol_type = other DNA

SEQ ID NO: 81165 - DNA, 80 bp, synthetic construct; identical to SEQ ID NO: 47746
  source 1..80: mol_type = other DNA

SEQ ID NO: 81166 - DNA, 80 bp, synthetic construct; identical to SEQ ID NO: 47747
  source 1..80: mol_type = other DNA

SEQ ID NO: 81167 - DNA, 80 bp, synthetic construct; identical to SEQ ID NO: 15796
  source 1..80: mol_type = other DNA

SEQ ID NO: 81168 - DNA, 80 bp, synthetic construct; identical to SEQ ID NO: 47749
  source 1..80: mol_type = other DNA

SEQ ID NO: 81169 - DNA, 80 bp, synthetic construct; identical to SEQ ID NO: 47750
  source 1..80: mol_type = other DNA

SEQ ID NO: 81170 - DNA, 80 bp, synthetic construct; identical to SEQ ID NO: 47751
  source 1..80: mol_type = other DNA

SEQ ID NO: 81171 - DNA, 80 bp, synthetic construct; identical to SEQ ID NO: 15797
  source 1..80: mol_type = other DNA

SEQ ID NO: 81172 - DNA, 80 bp, synthetic construct; identical to SEQ ID NO: 47753
  source 1..80: mol_type = other DNA

SEQ ID NO: 81173 - DNA, 80 bp, synthetic construct; identical to SEQ ID NO: 47754
  source 1..80: mol_type = other DNA

SEQ ID NO: 81174 - DNA, 80 bp, synthetic construct; identical to SEQ ID NO: 15798
  source 1..80: mol_type = other DNA

SEQ ID NO: 81175 - DNA, 80 bp, synthetic construct; identical to SEQ ID NO: 47756
  source 1..80: mol_type = other DNA

SEQ ID NO: 81176 - DNA, 80 bp, synthetic construct; identical to SEQ ID NO: 47757
  source 1..80: mol_type = other DNA

SEQ ID NO: 81177 - DNA, 80 bp, synthetic construct; identical to SEQ ID NO: 15799
  source 1..80: mol_type = other DNA

SEQ ID NO: 81178 - DNA, 80 bp, synthetic construct; identical to SEQ ID NO: 47760
  source 1..80: mol_type = other DNA

SEQ ID NO: 81179 - DNA, 80 bp, synthetic construct; identical to SEQ ID NO: 47761
  source 1..80: mol_type = other DNA

SEQ ID NO: 81180 - DNA, 80 bp, synthetic construct; identical to SEQ ID NO: 47762
  source 1..80: mol_type = other DNA

SEQ ID NO: 81181 - DNA, 80 bp, synthetic construct; identical to SEQ ID NO: 15800
  source 1..80: mol_type = other DNA

SEQ ID NO: 81182 - DNA, 80 bp, synthetic construct; identical to SEQ ID NO: 47766
  source 1..80: mol_type = other DNA

SEQ ID NO: 81183 - DNA, 80 bp, synthetic construct; identical to SEQ ID NO: 15801
  source 1..80: mol_type = other DNA

SEQ ID NO: 81184 - DNA, 80 bp, synthetic construct; identical to SEQ ID NO: 47769
  source 1..80: mol_type = other DNA

SEQ ID NO: 81185 - DNA, 80 bp, synthetic construct; identical to SEQ ID NO: 47770
  source 1..80: mol_type = other DNA

SEQ ID NO: 81186 - DNA, 80 bp, synthetic construct; identical to SEQ ID NO: 15802
  source 1..80: mol_type = other DNA

SEQ ID NO: 81187 - DNA, 80 bp, synthetic construct; identical to SEQ ID NO: 47772
  source 1..80: mol_type = other DNA

SEQ ID NO: 81188 - DNA, 80 bp, synthetic construct; identical to SEQ ID NO: 47773
  source 1..80: mol_type = other DNA

SEQ ID NO: 81189 - DNA, 80 bp, synthetic construct; identical to SEQ ID NO: 47774
  source 1..80: mol_type = other DNA

SEQ ID NO: 81190 - DNA, 80 bp, synthetic construct; identical to SEQ ID NO: 47775
  source 1..80: mol_type = other DNA

SEQ ID NO: 81191 - DNA, 80 bp, synthetic construct; identical to SEQ ID NO: 15803
  source 1..80: mol_type = other DNA

SEQ ID NO: 81192 - DNA, 80 bp, synthetic construct; identical to SEQ ID NO: 47778
  source 1..80: mol_type = other DNA

SEQ ID NO: 81193 - DNA, 80 bp, synthetic construct; identical to SEQ ID NO: 15804
  source 1..80: mol_type = other DNA

SEQ ID NO: 81194 - DNA, 80 bp, synthetic construct; identical to SEQ ID NO: 47780
  source 1..80: mol_type = other DNA

SEQ ID NO: 81195 - DNA, 80 bp, synthetic construct; identical to SEQ ID NO: 47781
  source 1..80: mol_type = other DNA

SEQ ID NO: 81196 - DNA, 80 bp, synthetic construct; identical to SEQ ID NO: 47782
  source 1..80: mol_type = other DNA

SEQ ID NO: 81197 - DNA, 80 bp, synthetic construct; identical to SEQ ID NO: 15805
  source 1..80: mol_type = other DNA

SEQ ID NO: 81198 - DNA, 80 bp, synthetic construct; identical to SEQ ID NO: 47785
  source 1..80: mol_type = other DNA

SEQ ID NO: 81199 - DNA, 80 bp, synthetic construct; identical to SEQ ID NO: 47786
  source 1..80: mol_type = other DNA

SEQ ID NO: 81200 - DNA, 80 bp, synthetic construct; identical to SEQ ID NO: 15806
  source 1..80: mol_type = other DNA

SEQ ID NO: 81201 - DNA, 80 bp, synthetic construct; identical to SEQ ID NO: 47789
  source 1..80: mol_type = other DNA

SEQ ID NO: 81202 - DNA, 80 bp, synthetic construct; identical to SEQ ID NO: 47790
  source 1..80: mol_type = other DNA

SEQ ID NO: 81203 - DNA, 80 bp, synthetic construct; identical to SEQ ID NO: 15807
  source 1..80: mol_type = other DNA

SEQ ID NO: 81204 - DNA, 80 bp, synthetic construct; identical to SEQ ID NO: 47793
  source 1..80: mol_type = other DNA

SEQ ID NO: 81205 - DNA, 80 bp, synthetic construct; identical to SEQ ID NO: 47794
  source 1..80: mol_type = other DNA

SEQ ID NO: 81206 - DNA, 80 bp, synthetic construct; identical to SEQ ID NO: 47795
  source 1..80: mol_type = other DNA

SEQ ID NO: 81207 - DNA, 80 bp, synthetic construct; identical to SEQ ID NO: 15808
  source 1..80: mol_type = other DNA

SEQ ID NO: 81208 - DNA, 80 bp, synthetic construct; identical to SEQ ID NO: 47798
  source 1..80: mol_type = other DNA

SEQ ID NO: 81209 - DNA, 80 bp, synthetic construct; identical to SEQ ID NO: 15809
  source 1..80: mol_type = other DNA

SEQ ID NO: 81210 - DNA, 80 bp, synthetic construct; identical to SEQ ID NO: 47800
  source 1..80: mol_type = other DNA

SEQ ID NO: 81211 - DNA, 80 bp, synthetic construct; identical to SEQ ID NO: 47801
  source 1..80: mol_type = other DNA

SEQ ID NO: 81212 - DNA, 80 bp, synthetic construct; identical to SEQ ID NO: 47802
  source 1..80: mol_type = other DNA

SEQ ID NO: 81213 - DNA, 80 bp, synthetic construct; identical to SEQ ID NO: 15810
  source 1..80: mol_type = other DNA

SEQ ID NO: 81214 - DNA, 80 bp, synthetic construct; identical to SEQ ID NO: 47804
  source 1..80: mol_type = other DNA

SEQ ID NO: 81215 - DNA, 80 bp, synthetic construct; identical to SEQ ID NO: 47806
  source 1..80: mol_type = other DNA

SEQ ID NO: 81216 - DNA, 80 bp, synthetic construct; identical to SEQ ID NO: 47807
  source 1..80: mol_type = other DNA

SEQ ID NO: 81217 - DNA, 80 bp, synthetic construct; identical to SEQ ID NO: 15811
  source 1..80: mol_type = other DNA

SEQ ID NO: 81218 - DNA, 80 bp, synthetic construct; identical to SEQ ID NO: 47809
  source 1..80: mol_type = other DNA

SEQ ID NO: 81219 - DNA, 80 bp, synthetic construct; identical to SEQ ID NO: 47810
  source 1..80: mol_type = other DNA

SEQ ID NO: 81220 - DNA, 80 bp, synthetic construct; identical to SEQ ID NO: 15812
  source 1..80: mol_type = other DNA

SEQ ID NO: 81221 - DNA, 80 bp, synthetic construct; identical to SEQ ID NO: 47813
  source 1..80: mol_type = other DNA

SEQ ID NO: 81222 - DNA, 80 bp, synthetic construct; identical to SEQ ID NO: 47814
  source 1..80: mol_type = other DNA

SEQ ID NO: 81223 - DNA, 80 bp, synthetic construct; identical to SEQ ID NO: 15813
  source 1..80: mol_type = other DNA

SEQ ID NO: 81224 - DNA, 80 bp, synthetic construct; identical to SEQ ID NO: 47817
  source 1..80: mol_type = other DNA

SEQ ID NO: 81225 - DNA, 80 bp, synthetic construct; identical to SEQ ID NO: 47818
  source 1..80: mol_type = other DNA

SEQ ID NO: 81226 - DNA, 80 bp, synthetic construct; identical to SEQ ID NO: 15814
  source 1..80: mol_type = other DNA

SEQ ID NO: 81227 - DNA, 80 bp, synthetic construct; identical to SEQ ID NO: 47821
  source 1..80: mol_type = other DNA

SEQ ID NO: 81228 - DNA, 80 bp, synthetic construct; identical to SEQ ID NO: 47822
  source 1..80: mol_type = other DNA

SEQ ID NO: 81229 - DNA, 80 bp, synthetic construct; identical to SEQ ID NO: 15815
  source 1..80: mol_type = other DNA

SEQ ID NO: 81230 - DNA, 80 bp, synthetic construct; identical to SEQ ID NO: 47826
  source 1..80: mol_type = other DNA

SEQ ID NO: 81231 - DNA, 80 bp, synthetic construct; identical to SEQ ID NO: 15816
  source 1..80: mol_type = other DNA

SEQ ID NO: 81232 - DNA, 80 bp, synthetic construct; identical to SEQ ID NO: 47828
  source 1..80: mol_type = other DNA

SEQ ID NO: 81233 - DNA, 80 bp, synthetic construct; identical to SEQ ID NO: 47829
  source 1..80: mol_type = other DNA

SEQ ID NO: 81234 - DNA, 80 bp, synthetic construct; identical to SEQ ID NO: 47830
  source 1..80: mol_type = other DNA

SEQ ID NO: 81235 - DNA, 80 bp, synthetic construct; identical to SEQ ID NO: 15817
  source 1..80: mol_type = other DNA

SEQ ID NO: 81236 - DNA, 80 bp, synthetic construct; identical to SEQ ID NO: 47832
  source 1..80: mol_type = other DNA

SEQ ID NO: 81237 - DNA, 80 bp, synthetic construct; identical to SEQ ID NO: 47833
  source 1..80: mol_type = other DNA

SEQ ID NO: 81238 - DNA, 80 bp, synthetic construct; identical to SEQ ID NO: 47834
  source 1..80: mol_type = other DNA

SEQ ID NO: 81239 - DNA, 80 bp, synthetic construct; identical to SEQ ID NO: 47835
  source 1..80: mol_type = other DNA

SEQ ID NO: 81240 - DNA, 80 bp, synthetic construct; identical to SEQ ID NO: 15818
  source 1..80: mol_type = other DNA

SEQ ID NO: 81241 - DNA, 80 bp, synthetic construct; identical to SEQ ID NO: 47838
  source 1..80: mol_type = other DNA

SEQ ID NO: 81242 - DNA, 80 bp, synthetic construct; identical to SEQ ID NO: 47839
  source 1..80: mol_type = other DNA

SEQ ID NO: 81243 - DNA, 80 bp, synthetic construct; identical to SEQ ID NO: 15819
  source 1..80: mol_type = other DNA

SEQ ID NO: 81244 - DNA, 80 bp, synthetic construct; identical to SEQ ID NO: 47841
  source 1..80: mol_type = other DNA

SEQ ID NO: 81245 - DNA, 80 bp, synthetic construct; identical to SEQ ID NO: 15820
  source 1..80: mol_type = other DNA

SEQ ID NO: 81246 - DNA, 80 bp, synthetic construct; identical to SEQ ID NO: 47844
  source 1..80: mol_type = other DNA

SEQ ID NO: 81247 - DNA, 80 bp, synthetic construct; identical to SEQ ID NO: 47845
  source 1..80: mol_type = other DNA

SEQ ID NO: 81248 - DNA, 80 bp, synthetic construct; identical to SEQ ID NO: 47846
  source 1..80: mol_type = other DNA

SEQ ID NO: 81249 - DNA, 80 bp, synthetic construct; identical to SEQ ID NO: 47847
  source 1..80: mol_type = other DNA

SEQ ID NO: 81250 - DNA, 80 bp, synthetic construct; identical to SEQ ID NO: 15821
  source 1..80: mol_type = other DNA

SEQ ID NO: 81251 - DNA, 80 bp, synthetic construct; identical to SEQ ID NO: 47850
  source 1..80: mol_type = other DNA

SEQ ID NO: 81252 - DNA, 80 bp, synthetic construct; identical to SEQ ID NO: 15822
  source 1..80: mol_type = other DNA

SEQ ID NO: 81253 - DNA, 80 bp, synthetic construct; identical to SEQ ID NO: 47852
  source 1..80: mol_type = other DNA

SEQ ID NO: 81254 - DNA, 80 bp, synthetic construct; identical to SEQ ID NO: 47853
  source 1..80: mol_type = other DNA

SEQ ID NO: 81255 - DNA, 80 bp, synthetic construct; identical to SEQ ID NO: 47854
  source 1..80: mol_type = other DNA

SEQ ID NO: 81256 - DNA, 80 bp, synthetic construct; identical to SEQ ID NO: 15823
  source 1..80: mol_type = other DNA

SEQ ID NO: 81257 - DNA, 80 bp, synthetic construct; identical to SEQ ID NO: 47856
  source 1..80: mol_type = other DNA

SEQ ID NO: 81258 - DNA, 80 bp, synthetic construct; identical to SEQ ID NO: 47857
  source 1..80: mol_type = other DNA

SEQ ID NO: 81259 - DNA, 80 bp, synthetic construct; identical to SEQ ID NO: 47858
  source 1..80: mol_type = other DNA

SEQ ID NO: 81260 - DNA, 80 bp, synthetic construct; identical to SEQ ID NO: 15824
  source 1..80: mol_type = other DNA

SEQ ID NO: 81261 - DNA, 80 bp, synthetic construct; identical to SEQ ID NO: 47860
  source 1..80: mol_type = other DNA

SEQ ID NO: 81262 - DNA, 80 bp, synthetic construct; identical to SEQ ID NO: 47862
  source 1..80: mol_type = other DNA

SEQ ID NO: 81263 - DNA, 80 bp, synthetic construct; identical to SEQ ID NO: 47863
  source 1..80: mol_type = other DNA

SEQ ID NO: 81264 - DNA, 80 bp, synthetic construct; identical to SEQ ID NO: 15825
  source 1..80: mol_type = other DNA

SEQ ID NO: 81265 - DNA, 80 bp, synthetic construct; identical to SEQ ID NO: 47865
  source 1..80: mol_type = other DNA

SEQ ID NO: 81266 - DNA, 80 bp, synthetic construct; identical to SEQ ID NO: 15826
  source 1..80: mol_type = other DNA

SEQ ID NO: 81267 - DNA, 80 bp, synthetic construct; identical to SEQ ID NO: 47868
  source 1..80: mol_type = other DNA

SEQ ID NO: 81268 - DNA, 80 bp, synthetic construct; identical to SEQ ID NO: 47869
  source 1..80: mol_type = other DNA

SEQ ID NO: 81269 - DNA, 80 bp, synthetic construct; identical to SEQ ID NO: 15827
  source 1..80: mol_type = other DNA

SEQ ID NO: 81270 - DNA, 80 bp, synthetic construct; identical to SEQ ID NO: 47872
  source 1..80: mol_type = other DNA

SEQ ID NO: 81271 - DNA, 80 bp, synthetic construct; identical to SEQ ID NO: 47873
  source 1..80: mol_type = other DNA

SEQ ID NO: 81272 - DNA, 80 bp, synthetic construct; identical to SEQ ID NO: 47874
  source 1..80: mol_type = other DNA

SEQ ID NO: 81273 - DNA, 80 bp, synthetic construct; identical to SEQ ID NO: 15828
  source 1..80: mol_type = other DNA

SEQ ID NO: 81274 - DNA, 80 bp, synthetic construct; identical to SEQ ID NO: 47876
  source 1..80: mol_type = other DNA

SEQ ID NO: 81275 - DNA, 80 bp, synthetic construct; identical to SEQ ID NO: 47877
  source 1..80: mol_type = other DNA

SEQ ID NO: 81276 - DNA, 80 bp, synthetic construct; identical to SEQ ID NO: 15829
  source 1..80: mol_type = other DNA

SEQ ID NO: 81277 - DNA, 80 bp, synthetic construct; identical to SEQ ID NO: 47880
  source 1..80: mol_type = other DNA

SEQ ID NO: 81278 - DNA, 80 bp, synthetic construct; identical to SEQ ID NO: 47881
  source 1..80: mol_type = other DNA

SEQ ID NO: 81279 - DNA, 80 bp, synthetic construct; identical to SEQ ID NO: 47883
  source 1..80: mol_type = other DNA

SEQ ID NO: 81280 - DNA, 80 bp, synthetic construct; identical to SEQ ID NO: 47884
  source 1..80: mol_type = other DNA

SEQ ID NO: 81281 - DNA, 80 bp, synthetic construct; identical to SEQ ID NO: 15831
  source 1..80: mol_type = other DNA

SEQ ID NO: 81282 - DNA, 80 bp, synthetic construct; identical to SEQ ID NO: 47887
  source 1..80: mol_type = other DNA

SEQ ID NO: 81283 - DNA, 80 bp, synthetic construct; identical to SEQ ID NO: 47888
  source 1..80: mol_type = other DNA

SEQ ID NO: 81284 - DNA, 80 bp, synthetic construct; identical to SEQ ID NO: 47889
  source 1..80: mol_type = other DNA

SEQ ID NO: 81285 - DNA, 80 bp, synthetic construct; identical to SEQ ID NO: 15832
  source 1..80: mol_type = other DNA

SEQ ID NO: 81286 - DNA, 80 bp, synthetic construct; identical to SEQ ID NO: 47891
  source 1..80: mol_type = other DNA

SEQ ID NO: 81287 - DNA, 80 bp, synthetic construct; identical to SEQ ID NO: 47893
  source 1..80: mol_type = other DNA

SEQ ID NO: 81288 - DNA, 80 bp, synthetic construct; identical to SEQ ID NO: 15833
  source 1..80: mol_type = other DNA

SEQ ID NO: 81289 - DNA, 80 bp, synthetic construct; identical to SEQ ID NO: 47896
  source 1..80: mol_type = other DNA

SEQ ID NO: 81290 - DNA, 80 bp, synthetic construct; identical to SEQ ID NO: 15834
  source 1..80: mol_type = other DNA

SEQ ID NO: 81291 - DNA, 80 bp, synthetic construct; identical to SEQ ID NO: 47899
  source 1..80: mol_type = other DNA

SEQ ID NO: 81292 - DNA, 80 bp, synthetic construct; identical to SEQ ID NO: 47900
  source 1..80: mol_type = other DNA

SEQ ID NO: 81293 - DNA, 80 bp, synthetic construct; identical to SEQ ID NO: 47901
  source 1..80: mol_type = other DNA

SEQ ID NO: 81294 - DNA, 80 bp, synthetic construct; identical to SEQ ID NO: 15835
  source 1..80: mol_type = other DNA

SEQ ID NO: 81295 - DNA, 80 bp, synthetic construct; identical to SEQ ID NO: 47903
  source 1..80: mol_type = other DNA

SEQ ID NO: 81296 - DNA, 80 bp, synthetic construct; identical to SEQ ID NO: 47905
  source 1..80: mol_type = other DNA

SEQ ID NO: 81297 - DNA, 80 bp, synthetic construct; identical to SEQ ID NO: 47906
  source 1..80: mol_type = other DNA

SEQ ID NO: 81298 - DNA, 80 bp, synthetic construct; identical to SEQ ID NO: 15836
  source 1..80: mol_type = other DNA

SEQ ID NO: 81299 - DNA, 80 bp, synthetic construct; identical to SEQ ID NO: 47908
  source 1..80: mol_type = other DNA

SEQ ID NO: 81300 - DNA, 80 bp, synthetic construct; identical to SEQ ID NO: 47909
  source 1..80: mol_type = other DNA

SEQ ID NO: 81301 - DNA, 80 bp, synthetic construct; identical to SEQ ID NO: 15837
  source 1..80: mol_type = other DNA

SEQ ID NO: 81302 - DNA, 80 bp, synthetic construct; identical to SEQ ID NO: 47911
  source 1..80: mol_type = other DNA

SEQ ID NO: 81303 - DNA, 80 bp, synthetic construct; identical to SEQ ID NO: 47912
  source 1..80: mol_type = other DNA

SEQ ID NO: 81304 - DNA, 80 bp, synthetic construct; identical to SEQ ID NO: 15838
  source 1..80: mol_type = other DNA

SEQ ID NO: 81305 - DNA, 80 bp, synthetic construct; identical to SEQ ID NO: 47915
  source 1..80: mol_type = other DNA

SEQ ID NO: 81306 - DNA, 80 bp, synthetic construct; identical to SEQ ID NO: 47916
  source 1..80: mol_type = other DNA

SEQ ID NO: 81307 - DNA, 80 bp, synthetic construct; identical to SEQ ID NO: 47918
  source 1..80: mol_type = other DNA

SEQ ID NO: 81308 - DNA, 80 bp, synthetic construct; identical to SEQ ID NO: 15839
  source 1..80: mol_type = other DNA

SEQ ID NO: 81309 - DNA, 80 bp, synthetic construct; identical to SEQ ID NO: 47920
  source 1..80: mol_type = other DNA

SEQ ID NO: 81310 - DNA, 80 bp, synthetic construct; identical to SEQ ID NO: 47922
  source 1..80: mol_type = other DNA

SEQ ID NO: 81311 - DNA, 80 bp, synthetic construct; identical to SEQ ID NO: 15840
  source 1..80: mol_type = other DNA

SEQ ID NO: 81312 - DNA, 80 bp, synthetic construct; identical to SEQ ID NO: 47924
  source 1..80: mol_type = other DNA

SEQ ID NO: 81313 - DNA, 80 bp, synthetic construct; identical to SEQ ID NO: 47925
  source 1..80: mol_type = other DNA

SEQ ID NO: 81314 - DNA, 80 bp, synthetic construct; identical to SEQ ID NO: 15841
  source 1..80: mol_type = other DNA

SEQ ID NO: 81315 - DNA, 80 bp, synthetic construct; identical to SEQ ID NO: 47927
  source 1..80: mol_type = other DNA

SEQ ID NO: 81316 - DNA, 80 bp, synthetic construct; identical to SEQ ID NO: 47928
  source 1..80: mol_type = other DNA

SEQ ID NO: 81317 - DNA, 80 bp, synthetic construct; identical to SEQ ID NO: 47929
  source 1..80: mol_type = other DNA

SEQ ID NO: 81318 - DNA, 80 bp, synthetic construct; identical to SEQ ID NO: 15842
  source 1..80: mol_type = other DNA

SEQ ID NO: 81319 - DNA, 80 bp, synthetic construct; identical to SEQ ID NO: 47932
  source 1..80: mol_type = other DNA

SEQ ID NO: 81320 - DNA, 80 bp, synthetic construct; identical to SEQ ID NO: 47933
  source 1..80: mol_type = other DNA

SEQ ID NO: 81321 - DNA, 80 bp, synthetic construct; identical to SEQ ID NO: 47934
  source 1..80: mol_type = other DNA

SEQ ID NO: 81322 - DNA, 80 bp, synthetic construct; identical to SEQ ID NO: 15843
  source 1..80: mol_type = other DNA

SEQ ID NO: 81323 - DNA, 80 bp, synthetic construct; identical to SEQ ID NO: 47936
  source 1..80: mol_type = other DNA

SEQ ID NO: 81324 - DNA, 80 bp, synthetic construct; identical to SEQ ID NO: 47938
  source 1..80: mol_type = other DNA

SEQ ID NO: 81325 - DNA, 80 bp, synthetic construct; identical to SEQ ID NO: 15844
  source 1..80: mol_type = other DNA

SEQ ID NO: 81326 - DNA, 80 bp, synthetic construct; identical to SEQ ID NO: 47940
  source 1..80: mol_type = other DNA

SEQ ID NO: 81327 - DNA, 80 bp, synthetic construct; identical to SEQ ID NO: 47941
  source 1..80: mol_type = other DNA

SEQ ID NO: 81328 - DNA, 80 bp, synthetic construct; identical to SEQ ID NO: 15845
  source 1..80: mol_type = other DNA

SEQ ID NO: 81329 - DNA, 80 bp, synthetic construct; identical to SEQ ID NO: 47943
  source 1..80: mol_type = other DNA

SEQ ID NO: 81330 - DNA, 80 bp, synthetic construct; identical to SEQ ID NO: 47944
  source 1..80: mol_type = other DNA

SEQ ID NO: 81331 - DNA, 80 bp, synthetic construct; identical to SEQ ID NO: 47945
  source 1..80: mol_type = other DNA

SEQ ID NO: 81332 - DNA, 80 bp, synthetic construct; identical to SEQ ID NO: 47946
  source 1..80: mol_type = other DNA

SEQ ID NO: 81333 - DNA, 80 bp, synthetic construct; identical to SEQ ID NO: 15846
  source 1..80: mol_type = other DNA

SEQ ID NO: 81334 - DNA, 80 bp, synthetic construct; identical to SEQ ID NO: 47948
  source 1..80: mol_type = other DNA

SEQ ID NO: 81335 - DNA, 80 bp, synthetic construct; identical to SEQ ID NO: 47950
  source 1..80: mol_type = other DNA

SEQ ID NO: 81336 - DNA, 80 bp, synthetic construct; identical to SEQ ID NO: 15847
  source 1..80: mol_type = other DNA

SEQ ID NO: 81337 - DNA, 80 bp, synthetic construct; identical to SEQ ID NO: 47952
  source 1..80: mol_type = other DNA

SEQ ID NO: 81338 - DNA, 80 bp, synthetic construct; identical to SEQ ID NO: 47953
  source 1..80: mol_type = other DNA

SEQ ID NO: 81339 - DNA, 80 bp, synthetic construct; identical to SEQ ID NO: 15848
  source 1..80: mol_type = other DNA

SEQ ID NO: 81340 - DNA, 80 bp, synthetic construct; identical to SEQ ID NO: 47955
  source 1..80: mol_type = other DNA

SEQ ID NO: 81341 - DNA, 80 bp, synthetic construct; identical to SEQ ID NO: 47957
  source 1..80: mol_type = other DNA

SEQ ID NO: 81342 - DNA, 80 bp, synthetic construct; identical to SEQ ID NO: 15849
  source 1..80: mol_type = other DNA

SEQ ID NO: 81343 - DNA, 80 bp, synthetic construct; identical to SEQ ID NO: 47960
  source 1..80: mol_type = other DNA

SEQ ID NO: 81344 - DNA, 80 bp, synthetic construct; identical to SEQ ID NO: 47962
  source 1..80: mol_type = other DNA

SEQ ID NO: 81345 - DNA, 80 bp, synthetic construct; identical to SEQ ID NO: 15850
  source 1..80: mol_type = other DNA

SEQ ID NO: 81346 - DNA, 80 bp, synthetic construct; identical to SEQ ID NO: 47964
  source 1..80: mol_type = other DNA

SEQ ID NO: 81347 - DNA, 80 bp, synthetic construct; identical to SEQ ID NO: 47965
  source 1..80: mol_type = other DNA

SEQ ID NO: 81348 - DNA, 80 bp, synthetic construct; identical to SEQ ID NO: 15851
  source 1..80: mol_type = other DNA

SEQ ID NO: 81349 - DNA, 80 bp, synthetic construct; identical to SEQ ID NO: 47967
  source 1..80: mol_type = other DNA

SEQ ID NO: 81350 - DNA, 80 bp, synthetic construct; identical to SEQ ID NO: 47968
  source 1..80: mol_type = other DNA

SEQ ID NO: 81351 - DNA, 80 bp, synthetic construct; identical to SEQ ID NO: 47969
  source 1..80: mol_type = other DNA

SEQ ID NO: 81352 - DNA, 80 bp, synthetic construct; identical to SEQ ID NO: 47972
  source 1..80: mol_type = other DNA

SEQ ID NO: 81353 - DNA, 80 bp, synthetic construct; identical to SEQ ID NO: 47974
  source 1..80: mol_type = other DNA

SEQ ID NO: 81354 - DNA, 80 bp, synthetic construct; identical to SEQ ID NO: 47975
  source 1..80: mol_type = other DNA

SEQ ID NO: 81355 - DNA, 80 bp, synthetic construct; identical to SEQ ID NO: 47976
  source 1..80: mol_type = other DNA

SEQ ID NO: 81356 - DNA, 80 bp, synthetic construct; identical to SEQ ID NO: 47977
  source 1..80: mol_type = other DNA

SEQ ID NO: 81357 - DNA, 80 bp, synthetic construct; identical to SEQ ID NO: 15853
  source 1..80: mol_type = other DNA

SEQ ID NO: 81358 - DNA, 80 bp, synthetic construct; identical to SEQ ID NO: 47979
  source 1..80: mol_type = other DNA

SEQ ID NO: 81359 - DNA, 80 bp, synthetic construct; identical to SEQ ID NO: 15854
  source 1..80: mol_type = other DNA

SEQ ID NO: 81360 - DNA, 80 bp, synthetic construct; identical to SEQ ID NO: 47981
  source 1..80: mol_type = other DNA

SEQ ID NO: 81361 - DNA, 80 bp, synthetic construct; identical to SEQ ID NO: 47982
  source 1..80: mol_type = other DNA

SEQ ID NO: 81362 - DNA, 80 bp, synthetic construct; identical to SEQ ID NO: 47983
  source 1..80: mol_type = other DNA

SEQ ID NO: 81363 - DNA, 80 bp, synthetic construct; identical to SEQ ID NO: 47984
  source 1..80: mol_type = other DNA

SEQ ID NO: 81364 - DNA, 80 bp, synthetic construct; identical to SEQ ID NO: 15855
  source 1..80: mol_type = other DNA

SEQ ID NO: 81365 - DNA, 80 bp, synthetic construct; identical to SEQ ID NO: 47986
  source 1..80: mol_type = other DNA

SEQ ID NO: 81366 - DNA, 80 bp, synthetic construct; identical to SEQ ID NO: 47987
  source 1..80: mol_type = other DNA

SEQ ID NO: 81367 - DNA, 80 bp, synthetic construct; identical to SEQ ID NO: 15856
  source 1..80: mol_type = other DNA

SEQ ID NO: 81368 - DNA, 80 bp, synthetic construct; identical to SEQ ID NO: 47989
  source 1..80: mol_type = other DNA

SEQ ID NO: 81369 - DNA, 80 bp, synthetic construct; identical to SEQ ID NO: 47990
  source 1..80: mol_type = other DNA

SEQ ID NO: 81370 - DNA, 80 bp, synthetic construct; identical to SEQ ID NO: 47991
  source 1..80: mol_type = other DNA

SEQ ID NO: 81371 - DNA, 80 bp, synthetic construct; identical to SEQ ID NO: 47992
  source 1..80: mol_type = other DNA

SEQ ID NO: 81372 - DNA, 80 bp, synthetic construct; identical to SEQ ID NO: 15857
  source 1..80: mol_type = other DNA

SEQ ID NO: 81373 - DNA, 80 bp, synthetic construct; identical to SEQ ID NO: 47994
  source 1..80: mol_type = other DNA

SEQ ID NO: 81374 - DNA, 80 bp, synthetic construct; identical to SEQ ID NO: 47995
  source 1..80: mol_type = other DNA

SEQ ID NO: 81375 - DNA, 80 bp, synthetic construct; identical to SEQ ID NO: 47996
  source 1..80: mol_type = other DNA

SEQ ID NO: 81376 - DNA, 80 bp, synthetic construct; identical to SEQ ID NO: 15858
  source 1..80: mol_type = other DNA

SEQ ID NO: 81377 - DNA, 80 bp, synthetic construct; identical to SEQ ID NO: 47998
  source 1..80: mol_type = other DNA

SEQ ID NO: 81378 - DNA, 80 bp, synthetic construct; identical to SEQ ID NO: 47999
  source 1..80: mol_type = other DNA

SEQ ID NO: 81379 - DNA, 80 bp, synthetic construct; identical to SEQ ID NO: 48000
  source 1..80: mol_type = other DNA

SEQ ID NO: 81380 - DNA, 80 bp, synthetic construct; identical to SEQ ID NO: 15859
  source 1..80: mol_type = other DNA

SEQ ID NO: 81381 - DNA, 80 bp, synthetic construct; identical to SEQ ID NO: 48002
  source 1..80: mol_type = other DNA

SEQ ID NO: 81382 - DNA, 80 bp, synthetic construct; identical to SEQ ID NO: 48003
  source 1..80: mol_type = other DNA

SEQ ID NO: 81383 - DNA, 80 bp, synthetic construct; identical to SEQ ID NO: 48004
  source 1..80: mol_type = other DNA

SEQ ID NO: 81384 - DNA, 80 bp, synthetic construct; identical to SEQ ID NO: 15860
  source 1..80: mol_type = other DNA

SEQ ID NO: 81385 - DNA, 80 bp, synthetic construct; identical to SEQ ID NO: 48006
  source 1..80: mol_type = other DNA

SEQ ID NO: 81386 - DNA, 80 bp, synthetic construct; identical to SEQ ID NO: 48007
  source 1..80: mol_type = other DNA

SEQ ID NO: 81387 - DNA, 80 bp, synthetic construct; identical to SEQ ID NO: 48008
  source 1..80: mol_type = other DNA

SEQ ID NO: 81388 - DNA, 80 bp, synthetic construct; identical to SEQ ID NO: 48009
  source 1..80: mol_type = other DNA

SEQ ID NO: 81389 - DNA, 80 bp, synthetic construct; identical to SEQ ID NO: 15861
  source 1..80: mol_type = other DNA

SEQ ID NO: 81390 - DNA, 80 bp, synthetic construct; identical to SEQ ID NO: 48011
  source 1..80: mol_type = other DNA

SEQ ID NO: 81391 - DNA, 80 bp, synthetic construct; identical to SEQ ID NO: 48012
  source 1..80: mol_type = other DNA

SEQ ID NO: 81392 - DNA, 80 bp, synthetic construct; identical to SEQ ID NO: 48013
  source 1..80: mol_type = other DNA

SEQ ID NO: 81393 - DNA, 80 bp, synthetic construct; identical to SEQ ID NO: 15862
  source 1..80: mol_type = other DNA

SEQ ID NO: 81394 - DNA, 80 bp, synthetic construct; identical to SEQ ID NO: 48015
  source 1..80: mol_type = other DNA

SEQ ID NO: 81395 - DNA, 80 bp, synthetic construct; identical to SEQ ID NO: 48016
  source 1..80: mol_type = other DNA

SEQ ID NO: 81396 - DNA, 80 bp, synthetic construct; identical to SEQ ID NO: 15863
  source 1..80: mol_type = other DNA

SEQ ID NO: 81397 - DNA, 80 bp, synthetic construct; identical to SEQ ID NO: 48018
  source 1..80: mol_type = other DNA

SEQ ID NO: 81398 - DNA, 80 bp, synthetic construct; identical to SEQ ID NO: 48020
  source 1..80: mol_type = other DNA

SEQ ID NO: 81399 - DNA, 80 bp, synthetic construct; identical to SEQ ID NO: 15864
  source 1..80: mol_type = other DNA

SEQ ID NO: 81400 - DNA, 80 bp, synthetic construct; identical to SEQ ID NO: 48022
  source 1..80: mol_type = other DNA

SEQ ID NO: 81401 - DNA, 80 bp, synthetic construct; identical to SEQ ID NO: 48024
  source 1..80: mol_type = other DNA

SEQ ID NO: 81402 - DNA, 80 bp, synthetic construct; identical to SEQ ID NO: 15865
  source 1..80: mol_type = other DNA

SEQ ID NO: 81403 - DNA, 80 bp, synthetic construct; identical to SEQ ID NO: 48026
  source 1..80: mol_type = other DNA

SEQ ID NO: 81404 - DNA, 80 bp, synthetic construct; identical to SEQ ID NO: 48027
  source 1..80: mol_type = other DNA

SEQ ID NO: 81405 - DNA, 80 bp, synthetic construct; identical to SEQ ID NO: 48028
  source 1..80: mol_type = other DNA

SEQ ID NO: 81406 - DNA, 80 bp, synthetic construct; identical to SEQ ID NO: 15866
  source 1..80: mol_type = other DNA

SEQ ID NO: 81407 - DNA, 80 bp, synthetic construct; identical to SEQ ID NO: 48030
  source 1..80: mol_type = other DNA

SEQ ID NO: 81408 - DNA, 80 bp, synthetic construct; identical to SEQ ID NO: 48031
  source 1..80: mol_type = other DNA

SEQ ID NO: 81409 - DNA, 80 bp, synthetic construct; identical to SEQ ID NO: 48032
  source 1..80: mol_type = other DNA

SEQ ID NO: 81410 - DNA, 80 bp, synthetic construct; identical to SEQ ID NO: 15867
  source 1..80: mol_type = other DNA

SEQ ID NO: 81411 - DNA, 80 bp, synthetic construct; identical to SEQ ID NO: 48034
  source 1..80: mol_type = other DNA

SEQ ID NO: 81412 - DNA, 80 bp, synthetic construct; identical to SEQ ID NO: 48035
  source 1..80: mol_type = other DNA

SEQ ID NO: 81413 - DNA, 80 bp, synthetic construct; identical to SEQ ID NO: 48036
  source 1..80: mol_type = other DNA

SEQ ID NO: 81414 - DNA, 80 bp, synthetic construct; identical to SEQ ID NO: 48037
  source 1..80: mol_type = other DNA

SEQ ID NO: 81415 - DNA, 80 bp, synthetic construct; identical to SEQ ID NO: 15868
  source 1..80: mol_type = other DNA

SEQ ID NO: 81416 - DNA, 80 bp, synthetic construct; identical to SEQ ID NO: 48039
  source 1..80: mol_type = other DNA

SEQ ID NO: 81417 - DNA, 80 bp, synthetic construct; identical to SEQ ID NO: 48040
  source 1..80: mol_type = other DNA

SEQ ID NO: 81418 - DNA, 80 bp, synthetic construct; identical to SEQ ID NO: 15869
  source 1..80: mol_type = other DNA

SEQ ID NO: 81419 - DNA, 80 bp, synthetic construct; identical to SEQ ID NO: 48042
  source 1..80: mol_type = other DNA

SEQ ID NO: 81420 - DNA, 80 bp, synthetic construct; identical to SEQ ID NO: 48043
  source 1..80: mol_type = other DNA

SEQ ID NO: 81421 - DNA, 80 bp, synthetic construct; identical to SEQ ID NO: 48044
  source 1..80: mol_type = other DNA

SEQ ID NO: 81422 - DNA, 80 bp, synthetic construct; identical to SEQ ID NO: 15870
  source 1..80: mol_type = other DNA

SEQ ID NO: 81423 - DNA, 80 bp, synthetic construct; identical to SEQ ID NO: 48046
  source 1..80: mol_type = other DNA

SEQ ID NO: 81424 - DNA, 80 bp, synthetic construct; identical to SEQ ID NO: 48047
  source 1..80: mol_type = other DNA

SEQ ID NO: 81425 - DNA, 80 bp, synthetic construct; identical to SEQ ID NO: 48048
  source 1..80: mol_type = other DNA

SEQ ID NO: 81426 - DNA, 80 bp, synthetic construct; identical to SEQ ID NO: 15871
  source 1..80: mol_type = other DNA

SEQ ID NO: 81427 - DNA, 80 bp, synthetic construct; identical to SEQ ID NO: 48050
  source 1..80: mol_type = other DNA

SEQ ID NO: 81428 - DNA, 80 bp, synthetic construct; identical to SEQ ID NO: 48051
  source 1..80: mol_type = other DNA

SEQ ID NO: 81429 - DNA, 80 bp, synthetic construct; identical to SEQ ID NO: 48052
  source 1..80: mol_type = other DNA

SEQ ID NO: 81430 - DNA, 80 bp, synthetic construct; identical to SEQ ID NO: 15872
  source 1..80: mol_type = other DNA

SEQ ID NO: 81431 - DNA, 80 bp, synthetic construct; identical to SEQ ID NO: 48055
  source 1..80: mol_type = other DNA

SEQ ID NO: 81432 - DNA, 80 bp, synthetic construct; identical to SEQ ID NO: 48056
  source 1..80: mol_type = other DNA

SEQ ID NO: 81433 - DNA, 80 bp, synthetic construct; identical to SEQ ID NO: 48057
  source 1..80: mol_type = other DNA

SEQ ID NO: 81434 - DNA, 80 bp, synthetic construct; identical to SEQ ID NO: 15873
  source 1..80: mol_type = other DNA

SEQ ID NO: 81435 - DNA, 80 bp, synthetic construct; identical to SEQ ID NO: 48059
  source 1..80: mol_type = other DNA

SEQ ID NO: 81436 - DNA, 80 bp, synthetic construct; identical to SEQ ID NO: 48060
  source 1..80: mol_type = other DNA

SEQ ID NO: 81437 - DNA, 80 bp, synthetic construct; identical to SEQ ID NO: 48061
  source 1..80: mol_type = other DNA

SEQ ID NO: 81438 - DNA, 80 bp, synthetic construct; identical to SEQ ID NO: 15874
  source 1..80: mol_type = other DNA

SEQ ID NO: 81439 - DNA, 80 bp, synthetic construct; identical to SEQ ID NO: 48063
  source 1..80: mol_type = other DNA

SEQ ID NO: 81440 - DNA, 80 bp, synthetic construct; identical to SEQ ID NO: 48064
  source 1..80: mol_type = other DNA

SEQ ID NO: 81441 - DNA, 80 bp, synthetic construct; identical to SEQ ID NO: 15875
  source 1..80: mol_type = other DNA

SEQ ID NO: 81442 - DNA, 80 bp, synthetic construct; identical to SEQ ID NO: 48066
  source 1..80: mol_type = other DNA

SEQ ID NO: 81443 - DNA, 80 bp, synthetic construct; identical to SEQ ID NO: 48067
  source 1..80: mol_type = other DNA

SEQ ID NO: 81444 - DNA, 80 bp, synthetic construct; identical to SEQ ID NO: 48068
  source 1..80: mol_type = other DNA

SEQ ID NO: 81445 - DNA, 80 bp, synthetic construct; identical to SEQ ID NO: 15876
  source 1..80: mol_type = other DNA

SEQ ID NO: 81446 - DNA, 80 bp, synthetic construct; identical to SEQ ID NO: 48071
  source 1..80: mol_type = other DNA

SEQ ID NO: 81447 - DNA, 80 bp, synthetic construct; identical to SEQ ID NO: 48072
  source 1..80: mol_type = other DNA

SEQ ID NO: 81448 - DNA, 80 bp, synthetic construct; identical to SEQ ID NO: 15877
  source 1..80: mol_type = other DNA

SEQ ID NO: 81449 - DNA, 80 bp, synthetic construct; identical to SEQ ID NO: 48075
  source 1..80: mol_type = other DNA

SEQ ID NO: 81450 - DNA, 80 bp, synthetic construct; identical to SEQ ID NO: 48076
  source 1..80: mol_type = other DNA

SEQ ID NO: 81451 - DNA, 80 bp, synthetic construct; identical to SEQ ID NO: 48077
  source 1..80: mol_type = other DNA

SEQ ID NO: 81452 - DNA, 80 bp, synthetic construct; identical to SEQ ID NO: 15878
  source 1..80: mol_type = other DNA

SEQ ID NO: 81453 - DNA, 80 bp, synthetic construct; identical to SEQ ID NO: 48079
  source 1..80: mol_type = other DNA

SEQ ID NO: 81454 - DNA, 80 bp, synthetic construct; identical to SEQ ID NO: 48080
  source 1..80: mol_type = other DNA

SEQ ID NO: 81455 - DNA, 80 bp, synthetic construct; identical to SEQ ID NO: 48081
  source 1..80: mol_type = other DNA

SEQ ID NO: 81456 - DNA, 80 bp, synthetic construct; identical to SEQ ID NO: 48082
  source 1..80: mol_type = other DNA

SEQ ID NO: 81457 - DNA, 80 bp, synthetic construct; identical to SEQ ID NO: 15879
  source 1..80: mol_type = other DNA

SEQ ID NO: 81458 - DNA, 80 bp, synthetic construct; identical to SEQ ID NO: 48084
  source 1..80: mol_type = other DNA

SEQ ID NO: 81459 - DNA, 80 bp, synthetic construct; identical to SEQ ID NO: 48085
  source 1..80: mol_type = other DNA

SEQ ID NO: 81460 - DNA, 80 bp, synthetic construct; identical to SEQ ID NO: 15880
  source 1..80: mol_type = other DNA

SEQ ID NO: 81461 - DNA, 80 bp, synthetic construct; identical to SEQ ID NO: 48087
  source 1..80: mol_type = other DNA

SEQ ID NO: 81462 - DNA, 80 bp, synthetic construct; identical to SEQ ID NO: 48088
  source 1..80: mol_type = other DNA

SEQ ID NO: 81463 - DNA, 80 bp, synthetic construct; identical to SEQ ID NO: 48089
  source 1..80: mol_type = other DNA

SEQ ID NO: 81464 - DNA, 80 bp, synthetic construct; identical to SEQ ID NO: 15881
  source 1..80: mol_type = other DNA

SEQ ID NO: 81465 - DNA, 80 bp, synthetic construct; identical to SEQ ID NO: 48091
  source 1..80: mol_type = other DNA

SEQ ID NO: 81466 - DNA, 80 bp, synthetic construct; identical to SEQ ID NO: 48092
  source 1..80: mol_type = other DNA

SEQ ID NO: 81467 - DNA, 80 bp, synthetic construct; identical to SEQ ID NO: 48093
  source 1..80: mol_type = other DNA

SEQ ID NO: 81468 - DNA, 80 bp, synthetic construct; identical to SEQ ID NO: 15882
  source 1..80: mol_type = other DNA

SEQ ID NO: 81469 - DNA, 80 bp, synthetic construct; identical to SEQ ID NO: 48096
  source 1..80: mol_type = other DNA

SEQ ID NO: 81470 - DNA, 80 bp, synthetic construct; identical to SEQ ID NO: 48097
  source 1..80: mol_type = other DNA

SEQ ID NO: 81471 - DNA, 80 bp, synthetic construct; identical to SEQ ID NO: 48098
  source 1..80: mol_type = other DNA

SEQ ID NO: 81472 - DNA, 80 bp, synthetic construct; identical to SEQ ID NO: 15883
  source 1..80: mol_type = other DNA

SEQ ID NO: 81473 - DNA, 80 bp, synthetic construct; identical to SEQ ID NO: 48100
  source 1..80: mol_type = other DNA

SEQ ID NO: 81474 - DNA, 80 bp, synthetic construct; identical to SEQ ID NO: 48101
  source 1..80: mol_type = other DNA

SEQ ID NO: 81475 - DNA, 80 bp, synthetic construct; identical to SEQ ID NO: 48102
  source 1..80: mol_type = other DNA

SEQ ID NO: 81476 - DNA, 80 bp, synthetic construct; identical to SEQ ID NO: 15884
  source 1..80: mol_type = other DNA

SEQ ID NO: 81477 - DNA, 80 bp, synthetic construct; identical to SEQ ID NO: 48104
  source 1..80: mol_type = other DNA

SEQ ID NO: 81478 - DNA, 80 bp, synthetic construct; identical to SEQ ID NO: 48105
  source 1..80: mol_type = other DNA

SEQ ID NO: 81479 - DNA, 80 bp, synthetic construct; identical to SEQ ID NO: 48106
  source 1..80: mol_type = other DNA

SEQ ID NO: 81480 - DNA, 80 bp, synthetic construct; identical to SEQ ID NO: 15885
  source 1..80: mol_type = other DNA

SEQ ID NO: 81481 - DNA, 80 bp, synthetic construct; identical to SEQ ID NO: 48108
  source 1..80: mol_type = other DNA

SEQ ID NO: 81482 - DNA, 80 bp, synthetic construct; identical to SEQ ID NO: 48109
  source 1..80: mol_type = other DNA

SEQ ID NO: 81483 - DNA, 80 bp, synthetic construct; identical to SEQ ID NO: 48110
  source 1..80: mol_type = other DNA

SEQ ID NO: 81484 - DNA, 80 bp, synthetic construct; identical to SEQ ID NO: 15886
  source 1..80: mol_type = other DNA

SEQ ID NO: 81485 - DNA, 80 bp, synthetic construct; identical to SEQ ID NO: 48112
  source 1..80: mol_type = other DNA

SEQ ID NO: 81486 - DNA, 80 bp, synthetic construct; identical to SEQ ID NO: 48113
  source 1..80: mol_type = other DNA

SEQ ID NO: 81487 - DNA, 80 bp, synthetic construct; identical to SEQ ID NO: 15887
  source 1..80: mol_type = other DNA

SEQ ID NO: 81488 - DNA, 80 bp, synthetic construct; identical to SEQ ID NO: 48115
  source 1..80: mol_type = other DNA

SEQ ID NO: 81489 - DNA, 80 bp, synthetic construct; identical to SEQ ID NO: 48116
  source 1..80: mol_type = other DNA

SEQ ID NO: 81490 - DNA, 80 bp, synthetic construct; identical to SEQ ID NO: 48117
  source 1..80: mol_type = other DNA

SEQ ID NO: 81491 - DNA, 80 bp, synthetic construct; identical to SEQ ID NO: 15888
  source 1..80: mol_type = other DNA

SEQ ID NO: 81492 - DNA, 80 bp, synthetic construct; identical to SEQ ID NO: 48119
  source 1..80: mol_type = other DNA

SEQ ID NO: 81493 - DNA, 80 bp, synthetic construct; identical to SEQ ID NO: 48120
  source 1..80: mol_type = other DNA

SEQ ID NO: 81494 - DNA, 80 bp, synthetic construct; identical to SEQ ID NO: 48121
  source 1..80: mol_type = other DNA

SEQ ID NO: 81495 - DNA, 80 bp, synthetic construct; identical to SEQ ID NO: 48122
  source 1..80: mol_type = other DNA

SEQ ID NO: 81496 - DNA, 80 bp, synthetic construct; identical to SEQ ID NO: 15889
  source 1..80: mol_type = other DNA

SEQ ID NO: 81497 - DNA, 80 bp, synthetic construct; identical to SEQ ID NO: 48124
  source 1..80: mol_type = other DNA

SEQ ID NO: 81498 - DNA, 80 bp, synthetic construct; identical to SEQ ID NO: 48125
  source 1..80: mol_type = other DNA

SEQ ID NO: 81499 - DNA, 80 bp, synthetic construct; identical to SEQ ID NO: 48126
  source 1..80: mol_type = other DNA

SEQ ID NO: 81500 - DNA, 80 bp, synthetic construct; identical to SEQ ID NO: 15890
  source 1..80: mol_type = other DNA

SEQ ID NO: 81501 - DNA, 80 bp, synthetic construct; identical to SEQ ID NO: 48128
  source 1..80: mol_type = other DNA

SEQ ID NO: 81502 - DNA, 80 bp, synthetic construct; identical to SEQ ID NO: 48129
  source 1..80: mol_type = other DNA

SEQ ID NO: 81503 - DNA, 80 bp, synthetic construct; identical to SEQ ID NO: 15891
  source 1..80: mol_type = other DNA

SEQ ID NO: 81504 - DNA, 80 bp, synthetic construct; identical to SEQ ID NO: 48132
  source 1..80: mol_type = other DNA

SEQ ID NO: 81505 - DNA, 80 bp, synthetic construct; identical to SEQ ID NO: 48133
  source 1..80: mol_type = other DNA

SEQ ID NO: 81506 - DNA, 80 bp, synthetic construct; identical to SEQ ID NO: 15892
  source 1..80: mol_type = other DNA

SEQ ID NO: 81507 - DNA, 80 bp, synthetic construct; identical to SEQ ID NO: 48135
  source 1..80: mol_type = other DNA

SEQ ID NO: 81508 - DNA, 80 bp, synthetic construct; identical to SEQ ID NO: 48136
  source 1..80: mol_type = other DNA

SEQ ID NO: 81509 - DNA, 80 bp, synthetic construct; identical to SEQ ID NO: 48137
  source 1..80: mol_type = other DNA

SEQ ID NO: 81510 - DNA, 80 bp, synthetic construct; identical to SEQ ID NO: 48138
  source 1..80: mol_type = other DNA

SEQ ID NO: 81511 - DNA, 80 bp, synthetic construct; identical to SEQ ID NO: 15893
  source 1..80: mol_type = other DNA

SEQ ID NO: 81512 - DNA, 80 bp, synthetic construct; identical to SEQ ID NO: 48140
  source 1..80: mol_type = other DNA

SEQ ID NO: 81513 - DNA, 80 bp, synthetic construct; identical to SEQ ID NO: 48141
  source 1..80: mol_type = other DNA

SEQ ID NO: 81514 - DNA, 80 bp, synthetic construct; identical to SEQ ID NO: 48142
  source 1..80: mol_type = other DNA

SEQ ID NO: 81515 - DNA, 80 bp, synthetic construct; identical to SEQ ID NO: 15894
  source 1..80: mol_type = other DNA

SEQ ID NO: 81516 - DNA, 80 bp, synthetic construct; identical to SEQ ID NO: 48144
  source 1..80: mol_type = other DNA

SEQ ID NO: 81517 - DNA, 80 bp, synthetic construct; identical to SEQ ID NO: 48145
  source 1..80: mol_type = other DNA

SEQ ID NO: 81518 - DNA, 80 bp, synthetic construct; identical to SEQ ID NO: 15895
  source 1..80: mol_type = other DNA

SEQ ID NO: 81519 - DNA, 80 bp, synthetic construct; identical to SEQ ID NO: 48147
  source 1..80: mol_type = other DNA

SEQ ID NO: 81520 - DNA, 80 bp, synthetic construct; identical to SEQ ID NO: 48148
  source 1..80: mol_type = other DNA

SEQ ID NO: 81521 - DNA, 80 bp, synthetic construct; identical to SEQ ID NO: 48149
  source 1..80: mol_type = other DNA

SEQ ID NO: 81522 - DNA, 80 bp, synthetic construct; identical to SEQ ID NO: 48150
  source 1..80: mol_type = other DNA

SEQ ID NO: 81523 - DNA, 80 bp, synthetic construct; identical to SEQ ID NO: 15896
  source 1..80: mol_type = other DNA

SEQ ID NO: 81524 - DNA, 80 bp, synthetic construct; identical to SEQ ID NO: 48152
  source 1..80: mol_type = other DNA

SEQ ID NO: 81525 - DNA, 80 bp, synthetic construct; identical to SEQ ID NO: 48153
  source 1..80: mol_type = other DNA

SEQ ID NO: 81526 - DNA, 80 bp, synthetic construct; identical to SEQ ID NO: 15897
  source 1..80: mol_type = other DNA

SEQ ID NO: 81527 - DNA, 80 bp, synthetic construct; identical to SEQ ID NO: 48155
  source 1..80: mol_type = other DNA

SEQ ID NO: 81528 - DNA, 80 bp, synthetic construct; identical to SEQ ID NO: 48156
  source 1..80: mol_type = other DNA

SEQ ID NO: 81529 - DNA, 80 bp, synthetic construct; identical to SEQ ID NO: 48157
  source 1..80: mol_type = other DNA

SEQ ID NO: 81530 - DNA, 80 bp, synthetic construct; identical to SEQ ID NO: 48158
  source 1..80: mol_type = other DNA

SEQ ID NO: 81531 - DNA, 80 bp, synthetic construct; identical to SEQ ID NO: 15898
  source 1..80: mol_type = other DNA

SEQ ID NO: 81532 - DNA, 80 bp, synthetic construct; identical to SEQ ID NO: 48160
  source 1..80: mol_type = other DNA

SEQ ID NO: 81533 - DNA, 80 bp, synthetic construct; identical to SEQ ID NO: 48161
  source 1..80: mol_type = other DNA

SEQ ID NO: 81534 - DNA, 80 bp, synthetic construct; identical to SEQ ID NO: 15899
  source 1..80: mol_type = other DNA

SEQ ID NO: 81535 - DNA, 80 bp, synthetic construct; identical to SEQ ID NO: 48163
  source 1..80: mol_type = other DNA

SEQ ID NO: 81536 - DNA, 80 bp, synthetic construct; identical to SEQ ID NO: 48164
  source 1..80: mol_type = other DNA

SEQ ID NO: 81537 - DNA, 80 bp, synthetic construct; identical to SEQ ID NO: 48165
  source 1..80: mol_type = other DNA

SEQ ID NO: 81538 - DNA, 80 bp, synthetic construct; identical to SEQ ID NO: 48166
  source 1..80: mol_type = other DNA

SEQ ID NO: 81539 - DNA, 80 bp, synthetic construct; identical to SEQ ID NO: 15900
  source 1..80: mol_type = other DNA

SEQ ID NO: 81540 - DNA, 80 bp, synthetic construct; identical to SEQ ID NO: 48169
  source 1..80: mol_type = other DNA

SEQ ID NO: 81541 - DNA, 80 bp, synthetic construct; identical to SEQ ID NO: 48170
  source 1..80: mol_type = other DNA

SEQ ID NO: 81542 - DNA, 80 bp, synthetic construct; identical to SEQ ID NO: 15901
  source 1..80: mol_type = other DNA

SEQ ID NO: 81543 - DNA, 80 bp, synthetic construct; identical to SEQ ID NO: 48172
  source 1..80: mol_type = other DNA

SEQ ID NO: 81544 - DNA, 80 bp, synthetic construct; identical to SEQ ID NO: 48173
  source 1..80: mol_type = other DNA

SEQ ID NO: 81545 - DNA, 80 bp, synthetic construct; identical to SEQ ID NO: 48174
  source 1..80: mol_type = other DNA

SEQ ID NO: 81546 - DNA, 80 bp, synthetic construct; identical to SEQ ID NO: 15902
  source 1..80: mol_type = other DNA

SEQ ID NO: 81547 - DNA, 80 bp, synthetic construct; identical to SEQ ID NO: 48176
  source 1..80: mol_type = other DNA

SEQ ID NO: 81548 - DNA, 80 bp, synthetic construct; identical to SEQ ID NO: 48177
  source 1..80: mol_type = other DNA

SEQ ID NO: 81549 - DNA, 80 bp, synthetic construct; identical to SEQ ID NO: 48178
  source 1..80: mol_type = other DNA

SEQ ID NO: 81550 - DNA, 80 bp, synthetic construct; identical to SEQ ID NO: 48179
  source 1..80: mol_type = other DNA

SEQ ID NO: 81551 - DNA, 80 bp, synthetic construct; identical to SEQ ID NO: 15903
  source 1..80: mol_type = other DNA

SEQ ID NO: 81552 - DNA, 80 bp, synthetic construct; identical to SEQ ID NO: 48181
  source 1..80: mol_type = other DNA

SEQ ID NO: 81553 - DNA, 80 bp, synthetic construct; identical to SEQ ID NO: 48182
  source 1..80: mol_type = other DNA

SEQ ID NO: 81554 - DNA, 80 bp, synthetic construct; identical to SEQ ID NO: 15904
  source 1..80: mol_type = other DNA

SEQ ID NO: 81555 - DNA, 80 bp, synthetic construct; identical to SEQ ID NO: 48184
  source 1..80: mol_type = other DNA

SEQ ID NO: 81556 - DNA, 80 bp, synthetic construct; identical to SEQ ID NO: 48185
  source 1..80: mol_type = other DNA

SEQ ID NO: 81557 - DNA, 80 bp, synthetic construct; identical to SEQ ID NO: 48186
  source 1..80: mol_type = other DNA

SEQ ID NO: 81558 - DNA, 80 bp, synthetic construct; identical to SEQ ID NO: 15905
  source 1..80: mol_type = other DNA

SEQ ID NO: 81559 - DNA, 80 bp, synthetic construct; identical to SEQ ID NO: 48188
  source 1..80: mol_type = other DNA

SEQ ID NO: 81560 - DNA, 80 bp, synthetic construct; identical to SEQ ID NO: 48189
  source 1..80: mol_type = other DNA

SEQ ID NO: 81561 - DNA, 80 bp, synthetic construct; identical to SEQ ID NO: 48190
  source 1..80: mol_type = other DNA

SEQ ID NO: 81562 - DNA, 80 bp, synthetic construct; identical to SEQ ID NO: 48191
  source 1..80: mol_type = other DNA

SEQ ID NO: 81563 - DNA, 80 bp, synthetic construct; identical to SEQ ID NO: 15906
  source 1..80: mol_type = other DNA

SEQ ID NO: 81564 - DNA, 80 bp, synthetic construct; identical to SEQ ID NO: 48193
  source 1..80: mol_type = other DNA

SEQ ID NO: 81565 - DNA, 80 bp, synthetic construct; identical to SEQ ID NO: 48194
  source 1..80: mol_type = other DNA

SEQ ID NO: 81566 - DNA, 80 bp, synthetic construct; identical to SEQ ID NO: 15907
  source 1..80: mol_type = other DNA

SEQ ID NO: 81567 - DNA, 80 bp, synthetic construct; identical to SEQ ID NO: 48196
  source 1..80: mol_type = other DNA

SEQ ID NO: 81568 - DNA, 80 bp, synthetic construct; identical to SEQ ID NO: 48197
  source 1..80: mol_type = other DNA

SEQ ID NO: 81569 - DNA, 80 bp, synthetic construct; identical to SEQ ID NO: 48198
  source 1..80: mol_type = other DNA

SEQ ID NO: 81570 - DNA, 80 bp, synthetic construct; identical to SEQ ID NO: 48199
  source 1..80: mol_type = other DNA

SEQ ID NO: 81571 - DNA, 80 bp, synthetic construct; identical to SEQ ID NO: 15908
  source 1..80: mol_type = other DNA

SEQ ID NO: 81572 - DNA, 80 bp, synthetic construct; identical to SEQ ID NO: 48201
  source 1..80: mol_type = other DNA

SEQ ID NO: 81573 - DNA, 80 bp, synthetic construct; identical to SEQ ID NO: 48202
  source 1..80: mol_type = other DNA

SEQ ID NO: 81574 - DNA, 80 bp, synthetic construct; identical to SEQ ID NO: 48203
  source 1..80: mol_type = other DNA

SEQ ID NO: 81575 - DNA, 80 bp, synthetic construct; identical to SEQ ID NO: 15909
  source 1..80: mol_type = other DNA

SEQ ID NO: 81576 - DNA, 80 bp, synthetic construct; identical to SEQ ID NO: 48205
  source 1..80: mol_type = other DNA

SEQ ID NO: 81577 - DNA, 80 bp, synthetic construct; identical to SEQ ID NO: 48206
  source 1..80: mol_type = other DNA

SEQ ID NO: 81578 - DNA, 80 bp, synthetic construct; identical to SEQ ID NO: 48207
  source 1..80: mol_type = other DNA

SEQ ID NO: 81579 - DNA, 80 bp, synthetic construct; identical to SEQ ID NO: 15910
  source 1..80: mol_type = other DNA

SEQ ID NO: 81580 - DNA, 80 bp, synthetic construct; identical to SEQ ID NO: 48209
  source 1..80: mol_type = other DNA

SEQ ID NO: 81581 - DNA, 80 bp, synthetic construct; identical to SEQ ID NO: 48210
  source 1..80: mol_type = other DNA

SEQ ID NO: 81582 - DNA, 80 bp, synthetic construct; identical to SEQ ID NO: 48211
  source 1..80: mol_type = other DNA

SEQ ID NO: 81583 - DNA, 80 bp, synthetic construct; identical to SEQ ID NO: 15911
  source 1..80: mol_type = other DNA

SEQ ID NO: 81584 - DNA, 80 bp, synthetic construct; identical to SEQ ID NO: 48214
  source 1..80: mol_type = other DNA

SEQ ID NO: 81585 - DNA, 80 bp, synthetic construct; identical to SEQ ID NO: 48215
  source 1..80: mol_type = other DNA

SEQ ID NO: 81586 - DNA, 80 bp, synthetic construct; identical to SEQ ID NO: 15912
  source 1..80: mol_type = other DNA

SEQ ID NO: 81587 - DNA, 80 bp, synthetic construct; identical to SEQ ID NO: 48217
  source 1..80: mol_type = other DNA

SEQ ID NO: 81588 - DNA, 80 bp, synthetic construct; identical to SEQ ID NO: 48218
  source 1..80: mol_type = other DNA

SEQ ID NO: 81589 - DNA, 80 bp, synthetic construct; identical to SEQ ID NO: 48219
  source 1..80: mol_type = other DNA

SEQ ID NO: 81590 - DNA, 80 bp, synthetic construct; identical to SEQ ID NO: 15913
  source 1..80: mol_type = other DNA

SEQ ID NO: 81591 - DNA, 80 bp, synthetic construct; identical to SEQ ID NO: 48221
  source 1..80: mol_type = other DNA

SEQ ID NO: 81592 - DNA, 80 bp, synthetic construct; identical to SEQ ID NO: 48222
  source 1..80: mol_type = other DNA

SEQ ID NO: 81593 - DNA, 80 bp, synthetic construct; identical to SEQ ID NO: 15914
  source 1..80: mol_type = other DNA

SEQ ID NO: 81594 - DNA, 80 bp, synthetic construct; identical to SEQ ID NO: 48224
  source 1..80: mol_type = other DNA

SEQ ID NO: 81595 - DNA, 80 bp, synthetic construct; identical to SEQ ID NO: 48225
  source 1..80: mol_type = other DNA

SEQ ID NO: 81596 - DNA, 80 bp, synthetic construct; identical to SEQ ID NO: 48226
  source 1..80: mol_type = other DNA

SEQ ID NO: 81597 - DNA, 80 bp, synthetic construct; identical to SEQ ID NO: 48227
  source 1..80: mol_type = other DNA

SEQ ID NO: 81598 - DNA, 80 bp, synthetic construct; identical to SEQ ID NO: 15915
  source 1..80: mol_type = other DNA

SEQ ID NO: 81599 - DNA, 80 bp, synthetic construct; identical to SEQ ID NO: 48229
  source 1..80: mol_type = other DNA

SEQ ID NO: 81600 - DNA, 80 bp, synthetic construct; identical to SEQ ID NO: 48230
  source 1..80: mol_type = other DNA

SEQ ID NO: 81601 - DNA, 80 bp, synthetic construct; identical to SEQ ID NO: 15916
  source 1..80: mol_type = other DNA

SEQ ID NO: 81602 - DNA, 80 bp, synthetic construct; identical to SEQ ID NO: 48232
  source 1..80: mol_type = other DNA

SEQ ID NO: 81603 - DNA, 80 bp, synthetic construct; identical to SEQ ID NO: 48233
  source 1..80: mol_type = other DNA

SEQ ID NO: 81604 - DNA, 80 bp, synthetic construct; identical to SEQ ID NO: 48234
  source 1..80: mol_type = other DNA

SEQ ID NO: 81605 - DNA, 80 bp, synthetic construct; identical to SEQ ID NO: 48235
  source 1..80: mol_type = other DNA

SEQ ID NO: 81606 - DNA, 80 bp, synthetic construct; identical to SEQ ID NO: 15917
  source 1..80: mol_type = other DNA

SEQ ID NO: 81607 - DNA, 80 bp, synthetic construct; identical to SEQ ID NO: 48237
  source 1..80: mol_type = other DNA

SEQ ID NO: 81608 - DNA, 80 bp, synthetic construct; identical to SEQ ID NO: 48238
  source 1..80: mol_type = other DNA

SEQ ID NO: 81609 - DNA, 80 bp, synthetic construct; identical to SEQ ID NO: 15918
  source 1..80: mol_type = other DNA

SEQ ID NO: 81610 - DNA, 80 bp, synthetic construct; identical to SEQ ID NO: 48240
  source 1..80: mol_type = other DNA

SEQ ID NO: 81611 - DNA, 80 bp, synthetic construct; identical to SEQ ID NO: 48241
  source 1..80: mol_type = other DNA

SEQ ID NO: 81612 - DNA, 80 bp, synthetic construct; identical to SEQ ID NO: 48242
  source 1..80: mol_type = other DNA

SEQ ID NO: 81613 - DNA, 80 bp, synthetic construct; identical to SEQ ID NO: 15919
  source 1..80: mol_type = other DNA

SEQ ID NO: 81614 - DNA, 80 bp, synthetic construct; identical to SEQ ID NO: 48244
  source 1..80: mol_type = other DNA

SEQ ID NO: 81615 - DNA, 80 bp, synthetic construct; identical to SEQ ID NO: 48245
  source 1..80: mol_type = other DNA

SEQ ID NO: 81616 - DNA, 80 bp, synthetic construct; identical to SEQ ID NO: 48246
  source 1..80: mol_type = other DNA

SEQ ID NO: 81617 - DNA, 80 bp, synthetic construct; identical to SEQ ID NO: 48247
  source 1..80: mol_type = other DNA

SEQ ID NO: 81618 - DNA, 80 bp, synthetic construct; identical to SEQ ID NO: 15920
  source 1..80: mol_type = other DNA

SEQ ID NO: 81619 - DNA, 80 bp, synthetic construct; identical to SEQ ID NO: 48249
  source 1..80: mol_type = other DNA

SEQ ID NO: 81620 - DNA, 80 bp, synthetic construct; identical to SEQ ID NO: 48250
  source 1..80: mol_type = other DNA

SEQ ID NO: 81621 - DNA, 80 bp, synthetic construct; identical to SEQ ID NO: 48251
  source 1..80: mol_type = other DNA

SEQ ID NO: 81622 - DNA, 80 bp, synthetic construct; identical to SEQ ID NO: 15921
  source 1..80: mol_type = other DNA

SEQ ID NO: 81623 - DNA, 80 bp, synthetic construct; identical to SEQ ID NO: 48254
  source 1..80: mol_type = other DNA

SEQ ID NO: 81624 - DNA, 80 bp, synthetic construct; identical to SEQ ID NO: 15922
  source 1..80: mol_type = other DNA

SEQ ID NO: 81625 - DNA, 80 bp, synthetic construct; identical to SEQ ID NO: 48256
  source 1..80: mol_type = other DNA

SEQ ID NO: 81626 - DNA, 80 bp, synthetic construct; identical to SEQ ID NO: 48257
  source 1..80: mol_type = other DNA

SEQ ID NO: 81627 - DNA, 80 bp, synthetic construct; identical to SEQ ID NO: 48258
  source 1..80: mol_type = other DNA

SEQ ID NO: 81628 - DNA, 80 bp, synthetic construct; identical to SEQ ID NO: 15923
  source 1..80: mol_type = other DNA

SEQ ID NO: 81629 - DNA, 80 bp, synthetic construct; identical to SEQ ID NO: 48260
  source 1..80: mol_type = other DNA

SEQ ID NO: 81630 - DNA, 80 bp, synthetic construct; identical to SEQ ID NO: 48261
  source 1..80: mol_type = other DNA

SEQ ID NO: 81631 - DNA, 80 bp, synthetic construct; identical to SEQ ID NO: 48262
  source 1..80: mol_type = other DNA

SEQ ID NO: 81632 - DNA, 80 bp, synthetic construct; identical to SEQ ID NO: 48263
  source 1..80: mol_type = other DNA

SEQ ID NO: 81633 - DNA, 80 bp, synthetic construct; identical to SEQ ID NO: 15924
  source 1..80: mol_type = other DNA

SEQ ID NO: 81634 - DNA, 80 bp, synthetic construct; identical to SEQ ID NO: 48265
  source 1..80: mol_type = other DNA

SEQ ID NO: 81635 - DNA, 80 bp, synthetic construct; identical to SEQ ID NO: 48266
  source 1..80: mol_type = other DNA

SEQ ID NO: 81636 - DNA, 80 bp, synthetic construct; identical to SEQ ID NO: 48267
  source 1..80: mol_type = other DNA

SEQ ID NO: 81637 - DNA, 80 bp, synthetic construct; identical to SEQ ID NO: 15925
  source 1..80: mol_type = other DNA

SEQ ID NO: 81638 - DNA, 80 bp, synthetic construct; identical to SEQ ID NO: 48269
  source 1..80: mol_type = other DNA

SEQ ID NO: 81639 - DNA, 80 bp, synthetic construct; identical to SEQ ID NO: 48270
  source 1..80: mol_type = other DNA

SEQ ID NO: 81640 - DNA, 80 bp, synthetic construct; identical to SEQ ID NO: 48271
  source 1..80: mol_type = other DNA

SEQ ID NO: 81641 - DNA, 80 bp, synthetic construct; identical to SEQ ID NO: 15926
  source 1..80: mol_type = other DNA

SEQ ID NO: 81642 - DNA, 80 bp, synthetic construct; identical to SEQ ID NO: 48273
  source 1..80: mol_type = other DNA

SEQ ID NO: 81643 - DNA, 80 bp, synthetic construct; identical to SEQ ID NO: 48274
  source 1..80: mol_type = other DNA

SEQ ID NO: 81644 - DNA, 80 bp, synthetic construct; identical to SEQ ID NO: 48275
  source 1..80: mol_type = other DNA

SEQ ID NO: 81645 - DNA, 80 bp, synthetic construct; identical to SEQ ID NO: 15927
  source 1..80: mol_type = other DNA

SEQ ID NO: 81646 - DNA, 80 bp, synthetic construct; identical to SEQ ID NO: 48277
  source 1..80: mol_type = other DNA

SEQ ID NO: 81647 - DNA, 80 bp, synthetic construct; identical to SEQ ID NO: 48278
  source 1..80: mol_type = other DNA

SEQ ID NO: 81648 - DNA, 80 bp, synthetic construct; identical to SEQ ID NO: 48279
  source 1..80: mol_type = other DNA

SEQ ID NO: 81649 - DNA, 80 bp, synthetic construct; identical to SEQ ID NO: 15928
  source 1..80: mol_type = other DNA

SEQ ID NO: 81650 - DNA, 80 bp, synthetic construct; identical to SEQ ID NO: 48281
  source 1..80: mol_type = other DNA

SEQ ID NO: 81651 - DNA, 80 bp, synthetic construct; identical to SEQ ID NO: 48282
  source 1..80: mol_type = other DNA

SEQ ID NO: 81652 - DNA, 80 bp, synthetic construct; identical to SEQ ID NO: 48283
  source 1..80: mol_type = other DNA

SEQ ID NO: 81653 - DNA, 80 bp, synthetic construct; identical to SEQ ID NO: 15929
  source 1..80: mol_type = other DNA

SEQ ID NO: 81654 - DNA, 80 bp, synthetic construct; identical to SEQ ID NO: 48286
  source 1..80: mol_type = other DNA

SEQ ID NO: 81655 - DNA, 80 bp, synthetic construct; identical to SEQ ID NO: 48287
  source 1..80: mol_type = other DNA

SEQ ID NO: 81656 - DNA, 80 bp, synthetic construct; identical to SEQ ID NO: 15930
  source 1..80: mol_type = other DNA

SEQ ID NO: 81657 - DNA, 80 bp, synthetic construct; identical to SEQ ID NO: 48289
  source 1..80: mol_type = other DNA

SEQ ID NO: 81658 - DNA, 80 bp, synthetic construct; identical to SEQ ID NO: 48290
  source 1..80: mol_type = other DNA

SEQ ID NO: 81659 - DNA, 80 bp, synthetic construct; identical to SEQ ID NO: 15931
  source 1..80: mol_type = other DNA

SEQ ID NO: 81660 - DNA, 80 bp, synthetic construct; identical to SEQ ID NO: 48292
  source 1..80: mol_type = other DNA

SEQ ID NO: 81661 - DNA, 80 bp, synthetic construct; identical to SEQ ID NO: 48293
  source 1..80: mol_type = other DNA

SEQ ID NO: 81662 - DNA, 80 bp, synthetic construct; identical to SEQ ID NO: 48294
  source 1..80: mol_type = other DNA

SEQ ID NO: 81663 - DNA, 80 bp, synthetic construct; identical to SEQ ID NO: 15932
  source 1..80: mol_type = other DNA

SEQ ID NO: 81664 - DNA, 80 bp, synthetic construct; identical to SEQ ID NO: 48296
  source 1..80: mol_type = other DNA

SEQ ID NO: 81665 - DNA, 80 bp, synthetic construct; identical to SEQ ID NO: 48297
  source 1..80: mol_type = other DNA

SEQ ID NO: 81666 - DNA, 80 bp, synthetic construct; identical to SEQ ID NO: 48298
  source 1..80: mol_type = other DNA

SEQ ID NO: 81667 - DNA, 80 bp, synthetic construct; identical to SEQ ID NO: 15933
  source 1..80: mol_type = other DNA

SEQ ID NO: 81668 - DNA, 80 bp, synthetic construct; identical to SEQ ID NO: 48300
  source 1..80: mol_type = other DNA

SEQ ID NO: 81669 - DNA, 80 bp, synthetic construct; identical to SEQ ID NO: 48301
  source 1..80: mol_type = other DNA

SEQ ID NO: 81670 - DNA, 80 bp, synthetic construct; identical to SEQ ID NO: 48302
  source 1..80: mol_type = other DNA

SEQ ID NO: 81671 - DNA, 80 bp, synthetic construct; identical to SEQ ID NO: 15934
  source 1..80: mol_type = other DNA

SEQ ID NO: 81672 - DNA, 80 bp, synthetic construct; identical to SEQ ID NO: 48304
  source 1..80: mol_type = other DNA

SEQ ID NO: 81673 - DNA, 80 bp, synthetic construct; identical to SEQ ID NO: 48305
  source 1..80: mol_type = other DNA

SEQ ID NO: 81674 - DNA, 80 bp, synthetic construct; identical to SEQ ID NO: 48306
  source 1..80: mol_type = other DNA

SEQ ID NO: 81675 - DNA, 80 bp, synthetic construct; identical to SEQ ID NO: 48307
  source 1..80: mol_type = other DNA

SEQ ID NO: 81676 - DNA, 80 bp, synthetic construct; identical to SEQ ID NO: 15935
  source 1..80: mol_type = other DNA

SEQ ID NO: 81677 - DNA, 80 bp, synthetic construct; identical to SEQ ID NO: 48309
  source 1..80: mol_type = other DNA

SEQ ID NO: 81678 - DNA, 80 bp, synthetic construct; identical to SEQ ID NO: 48310
  source 1..80: mol_type = other DNA

SEQ ID NO: 81679 - DNA, 80 bp, synthetic construct; identical to SEQ ID NO: 15936
  source 1..80: mol_type = other DNA

SEQ ID NO: 81680 - DNA, 80 bp, synthetic construct; identical to SEQ ID NO: 48312
  source 1..80: mol_type = other DNA

SEQ ID NO: 81681 - DNA, 80 bp, synthetic construct; identical to SEQ ID NO: 48313
  source 1..80: mol_type = other DNA

SEQ ID NO: 81682 - DNA, 80 bp, synthetic construct; identical to SEQ ID NO: 48314
  source 1..80: mol_type = other DNA

SEQ ID NO: 81683 - DNA, 80 bp, synthetic construct; identical to SEQ ID NO: 48315
  source 1..80: mol_type = other DNA

SEQ ID NO: 81684 - DNA, 80 bp, synthetic construct; identical to SEQ ID NO: 15937
  source 1..80: mol_type = other DNA

SEQ ID NO: 81685 - DNA, 80 bp, synthetic construct; identical to SEQ ID NO: 48317
  source 1..80: mol_type = other DNA

SEQ ID NO: 81686 - DNA, 80 bp, synthetic construct; identical to SEQ ID NO: 48318
  source 1..80: mol_type = other DNA

SEQ ID NO: 81687 - DNA, 80 bp, synthetic construct; identical to SEQ ID NO: 15938
  source 1..80: mol_type = other DNA

SEQ ID NO: 81688 - DNA, 80 bp, synthetic construct; identical to SEQ ID NO: 48321
  source 1..80: mol_type = other DNA

SEQ ID NO: 81689 - DNA, 80 bp, synthetic construct; identical to SEQ ID NO: 48322
  source 1..80: mol_type = other DNA

SEQ ID NO: 81690 - DNA, 80 bp, synthetic construct; identical to SEQ ID NO: 48323
  source 1..80: mol_type = other DNA

SEQ ID NO: 81691 - DNA, 80 bp, synthetic construct; identical to SEQ ID NO: 15939
  source 1..80: mol_type = other DNA

SEQ ID NO: 81692 - DNA, 80 bp, synthetic construct; identical to SEQ ID NO: 48325
  source 1..80: mol_type = other DNA

SEQ ID NO: 81693 - DNA, 80 bp, synthetic construct; identical to SEQ ID NO: 48326
  source 1..80: mol_type = other DNA

SEQ ID NO: 81694 - DNA, 80 bp, synthetic construct; identical to SEQ ID NO: 48327
  source 1..80: mol_type = other DNA

SEQ ID NO: 81695 - DNA, 80 bp, synthetic construct; identical to SEQ ID NO: 15940
  source 1..80: mol_type = other DNA

SEQ ID NO: 81696 - DNA, 80 bp, synthetic construct; identical to SEQ ID NO: 48329
  source 1..80: mol_type = other DNA

SEQ ID NO: 81697 - DNA, 80 bp, synthetic construct; identical to SEQ ID NO: 48330
  source 1..80: mol_type = other DNA

SEQ ID NO: 81698 - DNA, 80 bp, synthetic construct; identical to SEQ ID NO: 48331
  source 1..80: mol_type = other DNA

SEQ ID NO: 81699 - DNA, 80 bp, synthetic construct; identical to SEQ ID NO: 15941
  source 1..80: mol_type = other DNA

SEQ ID NO: 81700 - DNA, 80 bp, synthetic construct; identical to SEQ ID NO: 48333
  source 1..80: mol_type = other DNA

SEQ ID NO: 81701 - DNA, 80 bp, synthetic construct; identical to SEQ ID NO: 48334
  source 1..80: mol_type = other DNA

SEQ ID NO: 81702 - DNA, 80 bp, synthetic construct; identical to SEQ ID NO: 48335
  source 1..80: mol_type = other DNA

SEQ ID NO: 81703 - DNA, 80 bp, synthetic construct; identical to SEQ ID NO: 48336
  source 1..80: mol_type = other DNA

SEQ ID NO: 81704 - DNA, 80 bp, synthetic construct; identical to SEQ ID NO: 15942
  source 1..80: mol_type = other DNA

SEQ ID NO: 81705 - DNA, 80 bp, synthetic construct; identical to SEQ ID NO: 48338
  source 1..80: mol_type = other DNA

SEQ ID NO: 81706 - DNA, 80 bp, synthetic construct; identical to SEQ ID NO: 48339
  source 1..80: mol_type = other DNA

SEQ ID NO: 81707 - DNA, 80 bp, synthetic construct; identical to SEQ ID NO: 15943
  source 1..80: mol_type = other DNA

SEQ ID NO: 81708 - DNA, 80 bp, synthetic construct; identical to SEQ ID NO: 48341
  source 1..80: mol_type = other DNA

SEQ ID NO: 81709 - DNA, 80 bp, synthetic construct; identical to SEQ ID NO: 48342
  source 1..80: mol_type = other DNA

SEQ ID NO: 81710 - DNA, 80 bp, synthetic construct; identical to SEQ ID NO: 48343
  source 1..80: mol_type = other DNA

SEQ ID NO: 81711 - DNA, 80 bp, synthetic construct; identical to SEQ ID NO: 15944
  source 1..80: mol_type = other DNA

SEQ ID NO: 81712 - DNA, 80 bp, synthetic construct; identical to SEQ ID NO: 48345
  source 1..80: mol_type = other DNA

SEQ ID NO: 81713 - DNA, 80 bp, synthetic construct; identical to SEQ ID NO: 48346
  source 1..80: mol_type = other DNA

SEQ ID NO: 81714 - DNA, 80 bp, synthetic construct; identical to SEQ ID NO: 48347
  source 1..80: mol_type = other DNA

SEQ ID NO: 81715 - DNA, 80 bp, synthetic construct; identical to SEQ ID NO: 48348
  source 1..80: mol_type = other DNA

SEQ ID NO: 81716 - DNA, 80 bp, synthetic construct; identical to SEQ ID NO: 15945
  source 1..80: mol_type = other DNA

SEQ ID NO: 81717 - DNA, 80 bp, synthetic construct; identical to SEQ ID NO: 48350
  source 1..80: mol_type = other DNA

SEQ ID NO: 81718 - DNA, 80 bp, synthetic construct; identical to SEQ ID NO: 48351
  source 1..80: mol_type = other DNA

SEQ ID NO: 81719 - DNA, 80 bp, synthetic construct; identical to SEQ ID NO: 48352
  source 1..80: mol_type = other DNA

SEQ ID NO: 81720 - DNA, 80 bp, synthetic construct; identical to SEQ ID NO: 15946
  source 1..80: mol_type = other DNA

SEQ ID NO: 81721 - DNA, 80 bp, synthetic construct; identical to SEQ ID NO: 48354
  source 1..80: mol_type = other DNA

SEQ ID NO: 81722 - DNA, 80 bp, synthetic construct; identical to SEQ ID NO: 48355
  source 1..80: mol_type = other DNA

SEQ ID NO: 81723 - DNA, 80 bp, synthetic construct; identical to SEQ ID NO: 15947
  source 1..80: mol_type = other DNA

SEQ ID NO: 81724 - DNA, 80 bp, synthetic construct; identical to SEQ ID NO: 48357
  source 1..80: mol_type = other DNA

SEQ ID NO: 81725 - DNA, 80 bp, synthetic construct; identical to SEQ ID NO: 48358
  source 1..80: mol_type = other DNA

SEQ ID NO: 81726 - DNA, 80 bp, synthetic construct; identical to SEQ ID NO: 48359
  source 1..80: mol_type = other DNA

SEQ ID NO: 81727 - DNA, 80 bp, synthetic construct; identical to SEQ ID NO: 15948
  source 1..80: mol_type = other DNA

SEQ ID NO: 81728 - DNA, 80 bp, synthetic construct; identical to SEQ ID NO: 48361
  source 1..80: mol_type = other DNA

SEQ ID NO: 81729 - DNA, 80 bp, synthetic construct; identical to SEQ ID NO: 48362
  source 1..80: mol_type = other DNA

SEQ ID NO: 81730 - DNA, 80 bp, synthetic construct; identical to SEQ ID NO: 48363
  source 1..80: mol_type = other DNA

SEQ ID NO: 81731 - DNA, 80 bp, synthetic construct; identical to SEQ ID NO: 48364
  source 1..80: mol_type = other DNA

SEQ ID NO: 81732 - DNA, 80 bp, synthetic construct; identical to SEQ ID NO: 15949
  source 1..80: mol_type = other DNA

SEQ ID NO: 81733 - DNA, 80 bp, synthetic construct; identical to SEQ ID NO: 48366
  source 1..80: mol_type = other DNA

SEQ ID NO: 81734 - DNA, 80 bp, synthetic construct; identical to SEQ ID NO: 48367
  source 1..80: mol_type = other DNA

SEQ ID NO: 81735 - DNA, 80 bp, synthetic construct; identical to SEQ ID NO: 15950
  source 1..80: mol_type = other DNA

SEQ ID NO: 81736 - DNA, 80 bp, synthetic construct; identical to SEQ ID NO: 48369
  source 1..80: mol_type = other DNA

SEQ ID NO: 81737 - DNA, 80 bp, synthetic construct; identical to SEQ ID NO: 48370
  source 1..80: mol_type = other DNA

SEQ ID NO: 81738 - DNA, 80 bp, synthetic construct; identical to SEQ ID NO: 48371
  source 1..80: mol_type = other DNA

SEQ ID NO: 81739 - DNA, 80 bp, synthetic construct; identical to SEQ ID NO: 15951
  source 1..80: mol_type = other DNA

SEQ ID NO: 81740 - DNA, 80 bp, synthetic construct; identical to SEQ ID NO: 48373
  source 1..80: mol_type = other DNA

SEQ ID NO: 81741 - DNA, 80 bp, synthetic construct; identical to SEQ ID NO: 48374
  source 1..80: mol_type = other DNA

SEQ ID NO: 81742 - DNA, 80 bp, synthetic construct; identical to SEQ ID NO: 48375
  source 1..80: mol_type = other DNA

SEQ ID NO: 81743 - DNA, 80 bp, synthetic construct; identical to SEQ ID NO: 15952
  source 1..80: mol_type = other DNA

SEQ ID NO: 81744 - DNA, 80 bp, synthetic construct; identical to SEQ ID NO: 48378
  source 1..80: mol_type = other DNA

SEQ ID NO: 81745 - DNA, 80 bp, synthetic construct; identical to SEQ ID NO: 48379
  source 1..80: mol_type = other DNA

SEQ ID NO: 81746 - DNA, 80 bp, synthetic construct; identical to SEQ ID NO: 48380
  source 1..80: mol_type = other DNA

SEQ ID NO: 81747 - DNA, 80 bp, synthetic construct; identical to SEQ ID NO: 15953
  source 1..80: mol_type = other DNA

SEQ ID NO: 81748 - DNA, 80 bp, synthetic construct; identical to SEQ ID NO: 48382
  source 1..80: mol_type = other DNA

SEQ ID NO: 81749 - DNA, 80 bp, synthetic construct; identical to SEQ ID NO: 48383
  source 1..80: mol_type = other DNA

SEQ ID NO: 81750 - DNA, 80 bp, synthetic construct; identical to SEQ ID NO: 15954
  source 1..80: mol_type = other DNA

SEQ ID NO: 81751 - DNA, 80 bp, synthetic construct; identical to SEQ ID NO: 48385
  source 1..80: mol_type = other DNA

SEQ ID NO: 81752 - DNA, 80 bp, synthetic construct; identical to SEQ ID NO: 48386
  source 1..80: mol_type = other DNA

SEQ ID NO: 81753 - DNA, 80 bp, synthetic construct; identical to SEQ ID NO: 48387
  source 1..80: mol_type = other DNA

SEQ ID NO: 81754 - DNA, 80 bp, synthetic construct; identical to SEQ ID NO: 15955
  source 1..80: mol_type = other DNA

SEQ ID NO: 81755 - DNA, 80 bp, synthetic construct; identical to SEQ ID NO: 48389
  source 1..80: mol_type = other DNA

SEQ ID NO: 81756 - DNA, 80 bp, synthetic construct; identical to SEQ ID NO: 48390
  source 1..80: mol_type = other DNA

SEQ ID NO: 81757 - DNA, 80 bp, synthetic construct; identical to SEQ ID NO: 48391
  source 1..80: mol_type = other DNA

SEQ ID NO: 81758 - DNA, 80 bp, synthetic construct; identical to SEQ ID NO: 48392
  source 1..80: mol_type = other DNA

SEQ ID NO: 81759 - DNA, 80 bp, synthetic construct; identical to SEQ ID NO: 15956
  source 1..80: mol_type = other DNA

SEQ ID NO: 81760 - DNA, 80 bp, synthetic construct; identical to SEQ ID NO: 48394
  source 1..80: mol_type = other DNA

SEQ ID NO: 81761 - DNA, 80 bp, synthetic construct; identical to SEQ ID NO: 48395
  source 1..80: mol_type = other DNA

SEQ ID NO: 81762 - DNA, 80 bp, synthetic construct; identical to SEQ ID NO: 15957
  source 1..80: mol_type = other DNA

SEQ ID NO: 81763 - DNA, 80 bp, synthetic construct; identical to SEQ ID NO: 48397
  source 1..80: mol_type = other DNA

SEQ ID NO: 81764 - DNA, 80 bp, synthetic construct; identical to SEQ ID NO: 48398
  source 1..80: mol_type = other DNA

SEQ ID NO: 81765 - DNA, 80 bp, synthetic construct; identical to SEQ ID NO: 48399
  source 1..80: mol_type = other DNA

SEQ ID NO: 81766 - DNA, 80 bp, synthetic construct; identical to SEQ ID NO: 48400
  source 1..80: mol_type = other DNA

SEQ ID NO: 81767 - DNA, 80 bp, synthetic construct; identical to SEQ ID NO: 15958
  source 1..80: mol_type = other DNA

SEQ ID NO: 81768 - DNA, 80 bp, synthetic construct; identical to SEQ ID NO: 48402
  source 1..80: mol_type = other DNA

SEQ ID NO: 81769 - DNA, 80 bp, synthetic construct; identical to SEQ ID NO: 48403
  source 1..80: mol_type = other DNA

SEQ ID NO: 81770 - DNA, 80 bp, synthetic construct; identical to SEQ ID NO: 48404
  source 1..80: mol_type = other DNA

SEQ ID NO: 81771 - DNA, 80 bp, synthetic construct; identical to SEQ ID NO: 15959
  source 1..80: mol_type = other DNA

SEQ ID NO: 81772 - DNA, 80 bp, synthetic construct; identical to SEQ ID NO: 48406
  source 1..80: mol_type = other DNA

SEQ ID NO: 81773 - DNA, 80 bp, synthetic construct; identical to SEQ ID NO: 48407
  source 1..80: mol_type = other DNA

SEQ ID NO: 81774 - DNA, 80 bp, synthetic construct; identical to SEQ ID NO: 15960
  source 1..80: mol_type = other DNA

SEQ ID NO: 81775 - DNA, 80 bp, synthetic construct; identical to SEQ ID NO: 48409
  source 1..80: mol_type = other DNA

SEQ ID NO: 81776 - DNA, 80 bp, synthetic construct; identical to SEQ ID NO: 48410
  source 1..80: mol_type = other DNA

SEQ ID NO: 81777 - DNA, 80 bp, synthetic construct; identical to SEQ ID NO: 48411
  source 1..80: mol_type = other DNA

SEQ ID NO: 81778 - DNA, 80 bp, synthetic construct; identical to SEQ ID NO: 15961
  source 1..80: mol_type = other DNA

SEQ ID NO: 81779 - DNA, 80 bp, synthetic construct; identical to SEQ ID NO: 48413
  source 1..80: mol_type = other DNA

SEQ ID NO: 81780 - DNA, 80 bp, synthetic construct; identical to SEQ ID NO: 48414
  source 1..80: mol_type = other DNA

SEQ ID NO: 81781 - DNA, 80 bp, synthetic construct; identical to SEQ ID NO: 48415
  source 1..80: mol_type = other DNA

SEQ ID NO: 81782 - DNA, 80 bp, synthetic construct; identical to SEQ ID NO: 15962
  source 1..80: mol_type = other DNA

SEQ ID NO: 81783 - DNA, 80 bp, synthetic construct; identical to SEQ ID NO: 48417
  source 1..80: mol_type = other DNA

SEQ ID NO: 81784 - DNA, 80 bp, synthetic construct; identical to SEQ ID NO: 48418
  source 1..80: mol_type = other DNA

SEQ ID NO: 81785 - DNA, 80 bp, synthetic construct; identical to SEQ ID NO: 48419
  source 1..80: mol_type = other DNA

SEQ ID NO: 81786 - DNA, 80 bp, synthetic construct; identical to SEQ ID NO: 48420
  source 1..80: mol_type = other DNA

SEQ ID NO: 81787 - DNA, 80 bp, synthetic construct; identical to SEQ ID NO: 15963
  source 1..80: mol_type = other DNA

SEQ ID NO: 81788 - DNA, 80 bp, synthetic construct; identical to SEQ ID NO: 48422
  source 1..80: mol_type = other DNA

SEQ ID NO: 81789 - DNA, 80 bp, synthetic construct; identical to SEQ ID NO: 48423
  source 1..80: mol_type = other DNA

SEQ ID NO: 81790 - DNA, 80 bp, synthetic construct; identical to SEQ ID NO: 15964
  source 1..80: mol_type = other DNA

SEQ ID NO: 81791 - DNA, 80 bp, synthetic construct; identical to SEQ ID NO: 48425
  source 1..80: mol_type = other DNA

SEQ ID NO: 81792 - DNA, 80 bp, synthetic construct; identical to SEQ ID NO: 48426
  source 1..80: mol_type = other DNA

SEQ ID NO: 81793 - DNA, 80 bp, synthetic construct; identical to SEQ ID NO: 48427
  source 1..80: mol_type = other DNA

SEQ ID NO: 81794 - DNA, 80 bp, synthetic construct; identical to SEQ ID NO: 48428
  source 1..80: mol_type = other DNA

SEQ ID NO: 81795 - DNA, 80 bp, synthetic construct; identical to SEQ ID NO: 15965
  source 1..80: mol_type = other DNA

SEQ ID NO: 81796 - DNA, 80 bp, synthetic construct; identical to SEQ ID NO: 48430
  source 1..80: mol_type = other DNA

SEQ ID NO: 81797 - DNA, 80 bp, synthetic construct; identical to SEQ ID NO: 48432
  source 1..80: mol_type = other DNA

SEQ ID NO: 81798 - DNA, 80 bp, synthetic construct; identical to SEQ ID NO: 15966
  source 1..80: mol_type = other DNA

SEQ ID NO: 81799 - DNA, 80 bp, synthetic construct; identical to SEQ ID NO: 48434
  source 1..80: mol_type = other DNA

SEQ ID NO: 81800 - DNA, 80 bp, synthetic construct; identical to SEQ ID NO: 48435
  source 1..80: mol_type = other DNA

SEQ ID NO: 81801 - DNA, 80 bp, synthetic construct; identical to SEQ ID NO: 48436
  source 1..80: mol_type = other DNA

SEQ ID NO: 81802 - DNA, 80 bp, synthetic construct; identical to SEQ ID NO: 15967
  source 1..80: mol_type = other DNA

SEQ ID NO: 81803 - DNA, 80 bp, synthetic construct; identical to SEQ ID NO: 48438
  source 1..80: mol_type = other DNA

SEQ ID NO: 81804 - DNA, 80 bp, synthetic construct; identical to SEQ ID NO: 48439
  source 1..80: mol_type = other DNA

SEQ ID NO: 81805 - DNA, 80 bp, synthetic construct; identical to SEQ ID NO: 15968
  source 1..80: mol_type = other DNA

SEQ ID NO: 81806 - DNA, 80 bp, synthetic construct; identical to SEQ ID NO: 48441
  source 1..80: mol_type = other DNA

SEQ ID NO: 81807 - DNA, 80 bp, synthetic construct; identical to SEQ ID NO: 48442
  source 1..80: mol_type = other DNA

SEQ ID NO: 81808 - DNA, 80 bp, synthetic construct; identical to SEQ ID NO: 48443
  source 1..80: mol_type = other DNA

SEQ ID NO: 81809 - DNA, 80 bp, synthetic construct; identical to SEQ ID NO: 15969
  source 1..80: mol_type = other DNA

SEQ ID NO: 81810 - DNA, 80 bp, synthetic construct; identical to SEQ ID NO: 48446
  source 1..80: mol_type = other DNA

SEQ ID NO: 81811 - DNA, 80 bp, synthetic construct; identical to SEQ ID NO: 48447
  source 1..80: mol_type = other DNA

SEQ ID NO: 81812 - DNA, 80 bp, synthetic construct; identical to SEQ ID NO: 15970
  source 1..80: mol_type = other DNA

SEQ ID NO: 81813 - DNA, 80 bp, synthetic construct; identical to SEQ ID NO: 48449
  source 1..80: mol_type = other DNA

SEQ ID NO: 81814 - DNA, 80 bp, synthetic construct; identical to SEQ ID NO: 48450
  source 1..80: mol_type = other DNA

SEQ ID NO: 81815 - DNA, 80 bp, synthetic construct; identical to SEQ ID NO: 48452
  source 1..80: mol_type = other DNA

SEQ ID NO: 81816 - DNA, 80 bp, synthetic construct; identical to SEQ ID NO: 48454
  source 1..80: mol_type = other DNA

SEQ ID NO: 81817 - DNA, 80 bp, synthetic construct; identical to SEQ ID NO: 15972
  source 1..80: mol_type = other DNA

SEQ ID NO: 81818 - DNA, 80 bp, synthetic construct; identical to SEQ ID NO: 48458
  source 1..80: mol_type = other DNA

SEQ ID NO: 81819 - DNA, 80 bp, synthetic construct; identical to SEQ ID NO: 48459
  source 1..80: mol_type = other DNA

SEQ ID NO: 81820 - DNA, 80 bp, synthetic construct; identical to SEQ ID NO: 48460
  source 1..80: mol_type = other DNA

SEQ ID NO: 81821 - DNA, 80 bp, synthetic construct; identical to SEQ ID NO: 48462
  source 1..80: mol_type = other DNA

SEQ ID NO: 81822 - DNA, 80 bp, synthetic construct; identical to SEQ ID NO: 48464
  source 1..80: mol_type = other DNA

SEQ ID NO: 81823 - DNA, 80 bp, synthetic construct; identical to SEQ ID NO: 15974
  source 1..80: mol_type = other DNA

SEQ ID NO: 81824 - DNA, 80 bp, synthetic construct; identical to SEQ ID NO: 48468
  source 1..80: mol_type = other DNA

SEQ ID NO: 81825 - DNA, 80 bp, synthetic construct; identical to SEQ ID NO: 15975
  source 1..80: mol_type = other DNA

SEQ ID NO: 81826 - DNA, 80 bp, synthetic construct; identical to SEQ ID NO: 48472
  source 1..80: mol_type = other DNA

SEQ ID NO: 81827 - DNA, 80 bp, synthetic construct; identical to SEQ ID NO: 48473
  source 1..80: mol_type = other DNA

SEQ ID NO: 81828 - DNA, 80 bp, synthetic construct; identical to SEQ ID NO: 48475
  source 1..80: mol_type = other DNA

SEQ ID NO: 81829 - DNA, 80 bp, synthetic construct; identical to SEQ ID NO: 48476
  source 1..80: mol_type = other DNA

SEQ ID NO: 81830 - DNA, 80 bp, synthetic construct; identical to SEQ ID NO: 15977
  source 1..80: mol_type = other DNA

SEQ ID NO: 81831 - DNA, 80 bp, synthetic construct; identical to SEQ ID NO: 48479
  source 1..80: mol_type = other DNA

SEQ ID NO: 81832 - DNA, 80 bp, synthetic construct; identical to SEQ ID NO: 48480
  source 1..80: mol_type = other DNA

SEQ ID NO: 81833 - DNA, 80 bp, synthetic construct; identical to SEQ ID NO: 15978
  source 1..80: mol_type = other DNA

SEQ ID NO: 81834 - DNA, 80 bp, synthetic construct; identical to SEQ ID NO: 48482
  source 1..80: mol_type = other DNA

SEQ ID NO: 81835 - DNA, 80 bp, synthetic construct; identical to SEQ ID NO: 48484
  source 1..80: mol_type = other DNA

SEQ ID NO: 81836 - DNA, 80 bp, synthetic construct; identical to SEQ ID NO: 48485
  source 1..80: mol_type = other DNA

SEQ ID NO: 81837 - DNA, 80 bp, synthetic construct; identical to SEQ ID NO: 15979
  source 1..80: mol_type = other DNA

SEQ ID NO: 81838 - DNA, 80 bp, synthetic construct; identical to SEQ ID NO: 48487
  source 1..80: mol_type = other DNA

SEQ ID NO: 81839 - DNA, 80 bp, synthetic construct; identical to SEQ ID NO: 48488
  source 1..80: mol_type = other DNA

SEQ ID NO: 81840 - DNA, 80 bp, synthetic construct; identical to SEQ ID NO: 15980
  source 1..80: mol_type = other DNA

SEQ ID NO: 81841 - DNA, 80 bp, synthetic construct; identical to SEQ ID NO: 48490
  source 1..80: mol_type = other DNA

SEQ ID NO: 81842 - DNA, 80 bp, synthetic construct; identical to SEQ ID NO: 48492
  source 1..80: mol_type = other DNA

SEQ ID NO: 81843 - DNA, 80 bp, synthetic construct; identical to SEQ ID NO: 15981
  source 1..80: mol_type = other DNA

SEQ ID NO: 81844 - DNA, 80 bp, synthetic construct; identical to SEQ ID NO: 48494
  source 1..80: mol_type = other DNA

SEQ ID NO: 81845 - DNA, 80 bp, synthetic construct; identical to SEQ ID NO: 48495
  source 1..80: mol_type = other DNA

SEQ ID NO: 81846 - DNA, 80 bp, synthetic construct; identical to SEQ ID NO: 48496
  source 1..80: mol_type = other DNA

SEQ ID NO: 81847 - DNA, 80 bp, synthetic construct; identical to SEQ ID NO: 48497
  source 1..80: mol_type = other DNA

SEQ ID NO: 81848 - DNA, 80 bp, synthetic construct; identical to SEQ ID NO: 15982
  source 1..80: mol_type = other DNA

SEQ ID NO: 81849 - DNA, 80 bp, synthetic construct; identical to SEQ ID NO: 48499
  source 1..80: mol_type = other DNA

SEQ ID NO: 81850 - DNA, 80 bp, synthetic construct; identical to SEQ ID NO: 48500
  source 1..80: mol_type = other DNA

SEQ ID NO: 81851 - DNA, 80 bp, synthetic construct; identical to SEQ ID NO: 15983
  source 1..80: mol_type = other DNA

SEQ ID NO: 81852 - DNA, 80 bp, synthetic construct; identical to SEQ ID NO: 48502
  source 1..80: mol_type = other DNA

SEQ ID NO: 81853 - DNA, 80 bp, synthetic construct; identical to SEQ ID NO: 48503
  source 1..80: mol_type = other DNA

SEQ ID NO: 81854 - DNA, 80 bp, synthetic construct; identical to SEQ ID NO: 48504
  source 1..80: mol_type = other DNA

SEQ ID NO: 81855 - DNA, 80 bp, synthetic construct; identical to SEQ ID NO: 15984
  source 1..80: mol_type = other DNA

SEQ ID NO: 81856 - DNA, 80 bp, synthetic construct; identical to SEQ ID NO: 48506
  source 1..80: mol_type = other DNA

SEQ ID NO: 81857 - DNA, 80 bp, synthetic construct; identical to SEQ ID NO: 48507
  source 1..80: mol_type = other DNA

SEQ ID NO: 81858 - DNA, 80 bp, synthetic construct; identical to SEQ ID NO: 48508
  source 1..80: mol_type = other DNA

SEQ ID NO: 81859 - DNA, 80 bp, synthetic construct; identical to SEQ ID NO: 48509
  source 1..80: mol_type = other DNA

SEQ ID NO: 81860 - DNA, 80 bp, synthetic construct; identical to SEQ ID NO: 15985
  source 1..80: mol_type = other DNA

SEQ ID NO: 81861 - DNA, 80 bp, synthetic construct; identical to SEQ ID NO: 48511
  source 1..80: mol_type = other DNA

SEQ ID NO: 81862 - DNA, 80 bp, synthetic construct; identical to SEQ ID NO: 48513
  source 1..80: mol_type = other DNA

SEQ ID NO: 81863 - DNA, 80 bp, synthetic construct; identical to SEQ ID NO: 15986
  source 1..80: mol_type = other DNA

SEQ ID NO: 81864 - DNA, 80 bp, synthetic construct; identical to SEQ ID NO: 48515
  source 1..80: mol_type = other DNA

SEQ ID NO: 81865 - DNA, 80 bp, synthetic construct; identical to SEQ ID NO: 48516
  source 1..80: mol_type = other DNA

SEQ ID NO: 81866 - DNA, 80 bp, synthetic construct; identical to SEQ ID NO: 48517
  source 1..80: mol_type = other DNA

SEQ ID NO: 81867 - DNA, 80 bp, synthetic construct; identical to SEQ ID NO: 48518
  source 1..80: mol_type = other DNA

SEQ ID NO: 81868 - DNA, 80 bp, synthetic construct; identical to SEQ ID NO: 15987
  source 1..80: mol_type = other DNA

SEQ ID NO: 81869 - DNA, 80 bp, synthetic construct; identical to SEQ ID NO: 48520
  source 1..80: mol_type = other DNA

SEQ ID NO: 81870 - DNA, 80 bp, synthetic construct; identical to SEQ ID NO: 48521
  source 1..80: mol_type = other DNA

SEQ ID NO: 81871 - DNA, 80 bp, synthetic construct; identical to SEQ ID NO: 48522
  source 1..80: mol_type = other DNA

SEQ ID NO: 81872 - DNA, 80 bp, synthetic construct; identical to SEQ ID NO: 15988
  source 1..80: mol_type = other DNA

SEQ ID NO: 81873 - DNA, 80 bp, synthetic construct; identical to SEQ ID NO: 48524
  source 1..80: mol_type = other DNA

SEQ ID NO: 81874 - DNA, 80 bp, synthetic construct; identical to SEQ ID NO: 48525
  source 1..80: mol_type = other DNA

SEQ ID NO: 81875 - DNA, 80 bp, synthetic construct; identical to SEQ ID NO: 15989
  source 1..80: mol_type = other DNA

SEQ ID NO: 81876 - DNA, 80 bp, synthetic construct; identical to SEQ ID NO: 48528
  source 1..80: mol_type = other DNA

SEQ ID NO: 81877 - DNA, 80 bp, synthetic construct; identical to SEQ ID NO: 48529
  source 1..80: mol_type = other DNA

SEQ ID NO: 81878 - DNA, 80 bp, synthetic construct; identical to SEQ ID NO: 15990
  source 1..80: mol_type = other DNA

SEQ ID NO: 81879 - DNA, 80 bp, synthetic construct; identical to SEQ ID NO: 48531
  source 1..80: mol_type = other DNA

SEQ ID NO: 81880 - DNA, 80 bp, synthetic construct; identical to SEQ ID NO: 48532
  source 1..80: mol_type = other DNA

SEQ ID NO: 81881 - DNA, 80 bp, synthetic construct; identical to SEQ ID NO: 48533
  source 1..80: mol_type = other DNA

SEQ ID NO: 81882 - DNA, 80 bp, synthetic construct; identical to SEQ ID NO: 48534
  source 1..80: mol_type = other DNA

SEQ ID NO: 81883 - DNA, 80 bp, synthetic construct; identical to SEQ ID NO: 15991
  source 1..80: mol_type = other DNA

SEQ ID NO: 81884 - DNA, 80 bp, synthetic construct; identical to SEQ ID NO: 48536
  source 1..80: mol_type = other DNA

SEQ ID NO: 81885 - DNA, 80 bp, synthetic construct; identical to SEQ ID NO: 48537
  source 1..80: mol_type = other DNA

SEQ ID NO: 81886 - DNA, 80 bp, synthetic construct; identical to SEQ ID NO: 48538
  source 1..80: mol_type = other DNA

SEQ ID NO: 81887 - DNA, 80 bp, synthetic construct; identical to SEQ ID NO: 15992
  source 1..80: mol_type = other DNA

SEQ ID NO: 81888 - DNA, 80 bp, synthetic construct; identical to SEQ ID NO: 48540
  source 1..80: mol_type = other DNA

SEQ ID NO: 81889 - DNA, 80 bp, synthetic construct; identical to SEQ ID NO: 48541
  source 1..80: mol_type = other DNA

SEQ ID NO: 81890 - DNA, 80 bp, synthetic construct; identical to SEQ ID NO: 48542
  source 1..80: mol_type = other DNA

SEQ ID NO: 81891 - DNA, 80 bp, synthetic construct; identical to SEQ ID NO: 15993
  source 1..80: mol_type = other DNA

SEQ ID NO: 81892 - DNA, 80 bp, synthetic construct; identical to SEQ ID NO: 48544
  source 1..80: mol_type = other DNA

SEQ ID NO: 81893 - DNA, 80 bp, synthetic construct; identical to SEQ ID NO: 48545
  source 1..80: mol_type = other DNA

SEQ ID NO: 81894 - DNA, 80 bp, synthetic construct; identical to SEQ ID NO: 15994
  source 1..80: mol_type = other DNA

SEQ ID NO: 81895 - DNA, 80 bp, synthetic construct; identical to SEQ ID NO: 48547
  source 1..80: mol_type = other DNA

SEQ ID NO: 81896 - DNA, 80 bp, synthetic construct; identical to SEQ ID NO: 48548
  source 1..80: mol_type = other DNA

SEQ ID NO: 81897 - DNA, 80 bp, synthetic construct; identical to SEQ ID NO: 48549
  source 1..80: mol_type = other DNA

SEQ ID NO: 81898 - DNA, 80 bp, synthetic construct; identical to SEQ ID NO: 48550
  source 1..80: mol_type = other DNA

SEQ ID NO: 81899 - DNA, 80 bp, synthetic construct; identical to SEQ ID NO: 15995
  source 1..80: mol_type = other DNA

SEQ ID NO: 81900 - DNA, 80 bp, synthetic construct; identical to SEQ ID NO: 48552
  source 1..80: mol_type = other DNA

SEQ ID NO: 81901 - DNA, 80 bp, synthetic construct; identical to SEQ ID NO: 48553
  source 1..80: mol_type = other DNA

SEQ ID NO: 81902 - DNA, 80 bp, synthetic construct; identical to SEQ ID NO: 15996
  source 1..80: mol_type = other DNA

SEQ ID NO: 81903 - DNA, 80 bp, synthetic construct; identical to SEQ ID NO: 48555
  source 1..80: mol_type = other DNA

SEQ ID NO: 81904 - DNA, 80 bp, synthetic construct; identical to SEQ ID NO: 48556
  source 1..80: mol_type = other DNA

SEQ ID NO: 81905 - DNA, 80 bp, synthetic construct; identical to SEQ ID NO: 48557
  source 1..80: mol_type = other DNA

SEQ ID NO: 81906 - DNA, 80 bp, synthetic construct; identical to SEQ ID NO: 48558
  source 1..80: mol_type = other DNA

SEQ ID NO: 81907 - DNA, 80 bp, synthetic construct; identical to SEQ ID NO: 15997
  source 1..80: mol_type = other DNA

SEQ ID NO: 81908 - DNA, 80 bp, synthetic construct; identical to SEQ ID NO: 48560
  source 1..80: mol_type = other DNA

SEQ ID NO: 81909 - DNA, 80 bp, synthetic construct; identical to SEQ ID NO: 48561
  source 1..80: mol_type = other DNA

SEQ ID NO: 81910 - DNA, 80 bp, synthetic construct; identical to SEQ ID NO: 15998
  source 1..80: mol_type = other DNA

SEQ ID NO: 81911 - DNA, 80 bp, synthetic construct; identical to SEQ ID NO: 48563
  source 1..80: mol_type = other DNA

SEQ ID NO: 81912 - DNA, 80 bp, synthetic construct; identical to SEQ ID NO: 48564
  source 1..80: mol_type = other DNA

SEQ ID NO: 81913 - DNA, 80 bp, synthetic construct; identical to SEQ ID NO: 48565
  source 1..80: mol_type = other DNA

SEQ ID NO: 81914 - DNA, 80 bp, synthetic construct; identical to SEQ ID NO: 48566
  source 1..80: mol_type = other DNA

SEQ ID NO: 81915 - DNA, 80 bp, synthetic construct; identical to SEQ ID NO: 15999
  source 1..80: mol_type = other DNA

SEQ ID NO: 81916 - DNA, 80 bp, synthetic construct; identical to SEQ ID NO: 48568
  source 1..80: mol_type = other DNA

SEQ ID NO: 81917 - DNA, 80 bp, synthetic construct; identical to SEQ ID NO: 48569
  source 1..80: mol_type = other DNA

SEQ ID NO: 81918 - DNA, 80 bp, synthetic construct; identical to SEQ ID NO: 16000
  source 1..80: mol_type = other DNA

SEQ ID NO: 81919 - DNA, 80 bp, synthetic construct; identical to SEQ ID NO: 48571
  source 1..80: mol_type = other DNA

SEQ ID NO: 81920 - DNA, 80 bp, synthetic construct; identical to SEQ ID NO: 48572
  source 1..80: mol_type = other DNA

SEQ ID NO: 81921 - DNA, 80 bp, synthetic construct; identical to SEQ ID NO: 48573
  source 1..80: mol_type = other DNA

SEQ ID NO: 81922 - DNA, 80 bp, synthetic construct; identical to SEQ ID NO: 16001
  source 1..80: mol_type = other DNA

SEQ ID NO: 81923 - DNA, 80 bp, synthetic construct; identical to SEQ ID NO: 48575
  source 1..80: mol_type = other DNA

SEQ ID NO: 81924 - DNA, 80 bp, synthetic construct; identical to SEQ ID NO: 48576
  source 1..80: mol_type = other DNA

SEQ ID NO: 81925 - DNA, 80 bp, synthetic construct; identical to SEQ ID NO: 48577
  source 1..80: mol_type = other DNA

SEQ ID NO: 81926 - DNA, 80 bp, synthetic construct; identical to SEQ ID NO: 16002
  source 1..80: mol_type = other DNA

SEQ ID NO: 81927 - DNA, 80 bp, synthetic construct; identical to SEQ ID NO: 48580
  source 1..80: mol_type = other DNA

SEQ ID NO: 81928 - DNA, 80 bp, synthetic construct; identical to SEQ ID NO: 16003
  source 1..80: mol_type = other DNA

SEQ ID NO: 81929 - DNA, 80 bp, synthetic construct; identical to SEQ ID NO: 48582
  source 1..80: mol_type = other DNA

SEQ ID NO: 81930 - DNA, 80 bp, synthetic construct; identical to SEQ ID NO: 48584
  source 1..80: mol_type = other DNA

SEQ ID NO: 81931 - DNA, 80 bp, synthetic construct; identical to SEQ ID NO: 48586
  source 1..80: mol_type = other DNA

SEQ ID NO: 81932 - DNA, 80 bp, synthetic construct; identical to SEQ ID NO: 48588
  source 1..80: mol_type = other DNA

SEQ ID NO: 81933 - DNA, 80 bp, synthetic construct; identical to SEQ ID NO: 48590
  source 1..80: mol_type = other DNA

SEQ ID NO: 81934 - DNA, 80 bp, synthetic construct; identical to SEQ ID NO: 48592
  source 1..80: mol_type = other DNA

SEQ ID NO: 81935 - DNA, 80 bp, synthetic construct; identical to SEQ ID NO: 48594
  source 1..80: mol_type = other DNA

SEQ ID NO: 81936 - DNA, 80 bp, synthetic construct; identical to SEQ ID NO: 48596
  source 1..80: mol_type = other DNA

SEQ ID NO: 81937 - DNA, 80 bp, synthetic construct; identical to SEQ ID NO: 48598
  source 1..80: mol_type = other DNA

SEQ ID NO: 81938 - DNA, 80 bp, synthetic construct; identical to SEQ ID NO: 48600
  source 1..80: mol_type = other DNA

SEQ ID NO: 81939 - DNA, 80 bp, synthetic construct; identical to SEQ ID NO: 16008
  source 1..80: mol_type = other DNA

SEQ ID NO: 81940 - DNA, 80 bp, synthetic construct; identical to SEQ ID NO: 48604
  source 1..80: mol_type = other DNA

SEQ ID NO: 81941 - DNA, 80 bp, synthetic construct; identical to SEQ ID NO: 48605
  source 1..80: mol_type = other DNA

SEQ ID NO: 81942 - DNA, 80 bp, synthetic construct; identical to SEQ ID NO: 16009
  source 1..80: mol_type = other DNA

SEQ ID NO: 81943 - DNA, 80 bp, synthetic construct; identical to SEQ ID NO: 48608
  source 1..80: mol_type = other DNA

SEQ ID NO: 81944 - DNA, 80 bp, synthetic construct; identical to SEQ ID NO: 48609
  source 1..80: mol_type = other DNA

SEQ ID NO: 81945 - DNA, 80 bp, synthetic construct; identical to SEQ ID NO: 48610
  source 1..80: mol_type = other DNA

SEQ ID NO: 81946 - DNA, 80 bp, synthetic construct; identical to SEQ ID NO: 16010
  source 1..80: mol_type = other DNA

SEQ ID NO: 81947 - DNA, 80 bp, synthetic construct; identical to SEQ ID NO: 48613
  source 1..80: mol_type = other DNA

SEQ ID NO: 81948 - DNA, 80 bp, synthetic construct; identical to SEQ ID NO: 48614
  source 1..80: mol_type = other DNA

SEQ ID NO: 81949 - DNA, 80 bp, synthetic construct; identical to SEQ ID NO: 16011
  source 1..80: mol_type = other DNA

SEQ ID NO: 81950 - DNA, 80 bp, synthetic construct; identical to SEQ ID NO: 48616
  source 1..80: mol_type = other DNA

SEQ ID NO: 81951 - DNA, 80 bp, synthetic construct; identical to SEQ ID NO: 48617
  source 1..80: mol_type = other DNA

SEQ ID NO: 81952 - DNA, 80 bp, synthetic construct; identical to SEQ ID NO: 16012
  source 1..80: mol_type = other DNA

SEQ ID NO: 81953 - DNA, 80 bp, synthetic construct; identical to SEQ ID NO: 48619
  source 1..80: mol_type = other DNA

SEQ ID NO: 81954 - DNA, 80 bp, synthetic construct; identical to SEQ ID NO: 48620
  source 1..80: mol_type = other DNA

SEQ ID NO: 81955 - DNA, 80 bp, synthetic construct; identical to SEQ ID NO: 48621
  source 1..80: mol_type = other DNA

SEQ ID NO: 81956 - DNA, 80 bp, synthetic construct; identical to SEQ ID NO: 16013
  source 1..80: mol_type = other DNA

SEQ ID NO: 81957 - DNA, 80 bp, synthetic construct; identical to SEQ ID NO: 48623
  source 1..80: mol_type = other DNA

SEQ ID NO: 81958 - DNA, 80 bp, synthetic construct; identical to SEQ ID NO: 48624
  source 1..80: mol_type = other DNA

SEQ ID NO: 81959 - DNA, 80 bp, synthetic construct; identical to SEQ ID NO: 48625
  source 1..80: mol_type = other DNA

SEQ ID NO: 81960 - DNA, 80 bp, synthetic construct; identical to SEQ ID NO: 16014
  source 1..80: mol_type = other DNA

SEQ ID NO: 81961 - DNA, 80 bp, synthetic construct; identical to SEQ ID NO: 48628
  source 1..80: mol_type = other DNA

SEQ ID NO: 81962 - DNA, 80 bp, synthetic construct; identical to SEQ ID NO: 48629
  source 1..80: mol_type = other DNA

SEQ ID NO: 81963 - DNA, 80 bp, synthetic construct; identical to SEQ ID NO: 16015
  source 1..80: mol_type = other DNA

SEQ ID NO: 81964 - DNA, 80 bp, synthetic construct; identical to SEQ ID NO: 48631
  source 1..80: mol_type = other DNA

SEQ ID NO: 81965 - DNA, 80 bp, synthetic construct; identical to SEQ ID NO: 48632
  source 1..80: mol_type = other DNA

SEQ ID NO: 81966 - DNA, 80 bp, synthetic construct; identical to SEQ ID NO: 48633
  source 1..80: mol_type = other DNA

SEQ ID NO: 81967 - DNA, 80 bp, synthetic construct; identical to SEQ ID NO: 48634
  source 1..80: mol_type = other DNA

SEQ ID NO: 81968 - DNA, 80 bp, synthetic construct; identical to SEQ ID NO: 16016
  source 1..80: mol_type = other DNA

SEQ ID NO: 81969 - DNA, 80 bp, synthetic construct; identical to SEQ ID NO: 48636
  source 1..80: mol_type = other DNA

SEQ ID NO: 81970 - DNA, 80 bp, synthetic construct; identical to SEQ ID NO: 16017
  source 1..80: mol_type = other DNA

SEQ ID NO: 81971 - DNA, 80 bp, synthetic construct; identical to SEQ ID NO: 48638
  source 1..80: mol_type = other DNA

SEQ ID NO: 81972 - DNA, 80 bp, synthetic construct; identical to SEQ ID NO: 48639
  source 1..80: mol_type = other DNA

SEQ ID NO: 81973 - DNA, 80 bp, synthetic construct; identical to SEQ ID NO: 48640
  source 1..80: mol_type = other DNA

SEQ ID NO: 81974 - DNA, 80 bp, synthetic construct; identical to SEQ ID NO: 16018
  source 1..80: mol_type = other DNA

SEQ ID NO: 81975 - DNA, 80 bp, synthetic construct; identical to SEQ ID NO: 48642
  source 1..80: mol_type = other DNA

SEQ ID NO: 81976 - DNA, 80 bp, synthetic construct; identical to SEQ ID NO: 48643
  source 1..80: mol_type = other DNA

SEQ ID NO: 81977 - DNA, 80 bp, synthetic construct; identical to SEQ ID NO: 48644
  source 1..80: mol_type = other DNA

SEQ ID NO: 81978 - DNA, 80 bp, synthetic construct; identical to SEQ ID NO: 16019
  source 1..80: mol_type = other DNA

SEQ ID NO: 81979 - DNA, 80 bp, synthetic construct; identical to SEQ ID NO: 48646
  source 1..80: mol_type = other DNA

SEQ ID NO: 81980 - DNA, 80 bp, synthetic construct; identical to SEQ ID NO: 48647
  source 1..80: mol_type = other DNA

SEQ ID NO: 81981 - DNA, 80 bp, synthetic construct; identical to SEQ ID NO: 48648
  source 1..80: mol_type = other DNA

SEQ ID NO: 81982 - DNA, 80 bp, synthetic construct; identical to SEQ ID NO: 48649
  source 1..80: mol_type = other DNA

SEQ ID NO: 81983 - DNA, 80 bp, synthetic construct; identical to SEQ ID NO: 16020
  source 1..80: mol_type = other DNA

SEQ ID NO: 81984 - DNA, 80 bp, synthetic construct; identical to SEQ ID NO: 48651
  source 1..80: mol_type = other DNA

SEQ ID NO: 81985 - DNA, 80 bp, synthetic construct; identical to SEQ ID NO: 48652
  source 1..80: mol_type = other DNA

SEQ ID NO: 81986 - DNA, 80 bp, synthetic construct; identical to SEQ ID NO: 48653
  source 1..80: mol_type = other DNA

SEQ ID NO: 81987 - DNA, 80 bp, synthetic construct; identical to SEQ ID NO: 16021
  source 1..80: mol_type = other DNA

SEQ ID NO: 81988 - DNA, 80 bp, synthetic construct; identical to SEQ ID NO: 48655
  source 1..80: mol_type = other DNA

SEQ ID NO: 81989 - DNA, 80 bp, synthetic construct; identical to SEQ ID NO: 48656
  source 1..80: mol_type = other DNA

SEQ ID NO: 81990 - DNA, 80 bp, synthetic construct; identical to SEQ ID NO: 16022
  source 1..80: mol_type = other DNA

SEQ ID NO: 81991 - DNA, 80 bp, synthetic construct; identical to SEQ ID NO: 48658
  source 1..80: mol_type = other DNA

SEQ ID NO: 81992 - DNA, 80 bp, synthetic construct; identical to SEQ ID NO: 48659
  source 1..80: mol_type = other DNA

SEQ ID NO: 81993 - DNA, 80 bp, synthetic construct; identical to SEQ ID NO: 48660
  source 1..80: mol_type = other DNA

SEQ ID NO: 81994 - DNA, 80 bp, synthetic construct; identical to SEQ ID NO: 48661
  source 1..80: mol_type = other DNA

SEQ ID NO: 81995 - DNA, 80 bp, synthetic construct; identical to SEQ ID NO: 16023
  source 1..80: mol_type = other DNA

SEQ ID NO: 81996 - DNA, 80 bp, synthetic construct; identical to SEQ ID NO: 48663
  source 1..80: mol_type = other DNA

SEQ ID NO: 81997 - DNA, 80 bp, synthetic construct; identical to SEQ ID NO: 48664
  source 1..80: mol_type = other DNA

SEQ ID NO: 81998 - DNA, 80 bp, synthetic construct; identical to SEQ ID NO: 16024
  source 1..80: mol_type = other DNA

SEQ ID NO: 81999 - DNA, 80 bp, synthetic construct; identical to SEQ ID NO: 48666
  source 1..80: mol_type = other DNA

SEQ ID NO: 82000 - DNA, 80 bp, synthetic construct; identical to SEQ ID NO: 48667
  source 1..80: mol_type = other DNA

SEQ ID NO: 82001 - DNA, 80 bp, synthetic construct; identical to SEQ ID NO: 48668
  source 1..80: mol_type = other DNA

SEQ ID NO: 82002 - DNA, 80 bp, synthetic construct; identical to SEQ ID NO: 16025
  source 1..80: mol_type = other DNA

SEQ ID NO: 82003 - DNA, 80 bp, synthetic construct; identical to SEQ ID NO: 48670
  source 1..80: mol_type = other DNA

SEQ ID NO: 82004 - DNA, 80 bp, synthetic construct; identical to SEQ ID NO: 48671
  source 1..80: mol_type = other DNA

SEQ ID NO: 82005 - DNA, 80 bp, synthetic construct; identical to SEQ ID NO: 16026
  source 1..80: mol_type = other DNA

SEQ ID NO: 82006 - DNA, 80 bp, synthetic construct; identical to SEQ ID NO: 48675
  source 1..80: mol_type = other DNA

SEQ ID NO: 82007 - DNA, 80 bp, synthetic construct; identical to SEQ ID NO: 48676
  source 1..80: mol_type = other DNA

SEQ ID NO: 82008 - DNA, 80 bp, synthetic construct; identical to SEQ ID NO: 48677
  source 1..80: mol_type = other DNA

SEQ ID NO: 82009 - DNA, 80 bp, synthetic construct; identical to SEQ ID NO: 16027
  source 1..80: mol_type = other DNA

SEQ ID NO: 82010 - DNA, 80 bp, synthetic construct; identical to SEQ ID NO: 48679
  source 1..80: mol_type = other DNA

SEQ ID NO: 82011 - DNA, 80 bp, synthetic construct; identical to SEQ ID NO: 48680
  source 1..80: mol_type = other DNA

SEQ ID NO: 82012 - DNA, 80 bp, synthetic construct; identical to SEQ ID NO: 48681
  source 1..80: mol_type = other DNA

SEQ ID NO: 82013 - DNA, 80 bp, synthetic construct; identical to SEQ ID NO: 48682
  source 1..80: mol_type = other DNA

SEQ ID NO: 82014 - DNA, 80 bp, synthetic construct; identical to SEQ ID NO: 16028
  source 1..80: mol_type = other DNA

SEQ ID NO: 82015 - DNA, 80 bp, synthetic construct; identical to SEQ ID NO: 48684
  source 1..80: mol_type = other DNA

SEQ ID NO: 82016 - DNA, 80 bp, synthetic construct; identical to SEQ ID NO: 48685
  source 1..80: mol_type = other DNA

SEQ ID NO: 82017 - DNA, 80 bp, synthetic construct; identical to SEQ ID NO: 16029
  source 1..80: mol_type = other DNA

SEQ ID NO: 82018 - DNA, 80 bp, synthetic construct; identical to SEQ ID NO: 48687
  source 1..80: mol_type = other DNA

SEQ ID NO: 82019 - DNA, 80 bp, synthetic construct; identical to SEQ ID NO: 48688
  source 1..80: mol_type = other DNA

SEQ ID NO: 82020 - DNA, 80 bp, synthetic construct; identical to SEQ ID NO: 48689
  source 1..80: mol_type = other DNA

SEQ ID NO: 82021 - DNA, 80 bp, synthetic construct; identical to SEQ ID NO: 48690
  source 1..80: mol_type = other DNA

SEQ ID NO: 82022 - DNA, 80 bp, synthetic construct; identical to SEQ ID NO: 16030
  source 1..80: mol_type = other DNA

SEQ ID NO: 82023 - DNA, 80 bp, synthetic construct; identical to SEQ ID NO: 48692
  source 1..80: mol_type = other DNA

SEQ ID NO: 82024 - DNA, 80 bp, synthetic construct; identical to SEQ ID NO: 48693
  source 1..80: mol_type = other DNA

SEQ ID NO: 82025 - DNA, 80 bp, synthetic construct; identical to SEQ ID NO: 16031
  source 1..80: mol_type = other DNA

SEQ ID NO: 82026 - DNA, 80 bp, synthetic construct; identical to SEQ ID NO: 48695
  source 1..80: mol_type = other DNA

SEQ ID NO: 82027 - DNA, 80 bp, synthetic construct; identical to SEQ ID NO: 48696
  source 1..80: mol_type = other DNA

SEQ ID NO: 82028 - DNA, 80 bp, synthetic construct; identical to SEQ ID NO: 48697
  source 1..80: mol_type = other DNA

SEQ ID NO: 82029 - DNA, 80 bp, synthetic construct; identical to SEQ ID NO: 48698
  source 1..80: mol_type = other DNA

SEQ ID NO: 82030 - DNA, 80 bp, synthetic construct; identical to SEQ ID NO: 48699
  source 1..80: mol_type = other DNA

SEQ ID NO: 82031 - DNA, 80 bp, synthetic construct; identical to SEQ ID NO: 48700
  source 1..80: mol_type = other DNA

SEQ ID NO: 82032 - DNA, 80 bp, synthetic construct; identical to SEQ ID NO: 48701
  source 1..80: mol_type = other DNA

SEQ ID NO: 82033 - DNA, 80 bp, synthetic construct; identical to SEQ ID NO: 48702
  source 1..80: mol_type = other DNA

SEQ ID NO: 82034 - DNA, 80 bp, synthetic construct; identical to SEQ ID NO: 16032
  source 1..80: mol_type = other DNA

SEQ ID NO: 82035 - DNA, 80 bp, synthetic construct; identical to SEQ ID NO: 48704
  source 1..80: mol_type = other DNA

SEQ ID NO: 82036 - DNA, 80 bp, synthetic construct; identical to SEQ ID NO: 48705
  source 1..80: mol_type = other DNA

SEQ ID NO: 82037 - DNA, 80 bp, synthetic construct; identical to SEQ ID NO: 16033
  source 1..80: mol_type = other DNA

SEQ ID NO: 82038 - DNA, 80 bp, synthetic construct; identical to SEQ ID NO: 48707
  source 1..80: mol_type = other DNA

SEQ ID NO: 82039 - DNA, 80 bp, synthetic construct; identical to SEQ ID NO: 48708
  source 1..80: mol_type = other DNA

SEQ ID NO: 82040 - DNA, 80 bp, synthetic construct; identical to SEQ ID NO: 48709
  source 1..80: mol_type = other DNA

SEQ ID NO: 82041 - DNA, 80 bp, synthetic construct; identical to SEQ ID NO: 48710
  source 1..80: mol_type = other DNA

SEQ ID NO: 82042 - DNA, 80 bp, synthetic construct; identical to SEQ ID NO: 16034
  source 1..80: mol_type = other DNA

SEQ ID NO: 82043 - DNA, 80 bp, synthetic construct; identical to SEQ ID NO: 48712
  source 1..80: mol_type = other DNA

SEQ ID NO: 82044 - DNA, 80 bp, synthetic construct; identical to SEQ ID NO: 48713
  source 1..80: mol_type = other DNA

SEQ ID NO: 82045 - DNA, 80 bp, synthetic construct; identical to SEQ ID NO: 48714
  source 1..80: mol_type = other DNA

SEQ ID NO: 82046 - DNA, 80 bp, synthetic construct; identical to SEQ ID NO: 48715
  source 1..80: mol_type = other DNA

SEQ ID NO: 82047 - DNA, 80 bp, synthetic construct; identical to SEQ ID NO: 16035
  source 1..80: mol_type = other DNA

SEQ ID NO: 82048 - DNA, 80 bp, synthetic construct; identical to SEQ ID NO: 48717
  source 1..80: mol_type = other DNA

SEQ ID NO: 82049 - DNA, 80 bp, synthetic construct; identical to SEQ ID NO: 48718
  source 1..80: mol_type = other DNA

SEQ ID NO: 82050 - DNA, 80 bp, synthetic construct; identical to SEQ ID NO: 16036
  source 1..80: mol_type = other DNA

SEQ ID NO: 82051 - DNA, 80 bp, synthetic construct; identical to SEQ ID NO: 48720
  source 1..80: mol_type = other DNA

SEQ ID NO: 82052 - DNA, 80 bp, synthetic construct; identical to SEQ ID NO: 48721
  source 1..80: mol_type = other DNA

SEQ ID NO: 82053 - DNA, 80 bp, synthetic construct; identical to SEQ ID NO: 48722
  source 1..80: mol_type = other DNA

SEQ ID NO: 82054 - DNA, 80 bp, synthetic construct; identical to SEQ ID NO: 48723
  source 1..80: mol_type = other DNA

SEQ ID NO: 82055 - DNA, 80 bp, synthetic construct; identical to SEQ ID NO: 16037
  source 1..80: mol_type = other DNA

SEQ ID NO: 82056 - DNA, 80 bp, synthetic construct; identical to SEQ ID NO: 48725
  source 1..80: mol_type = other DNA

SEQ ID NO: 82057 - DNA, 80 bp, synthetic construct; identical to SEQ ID NO: 48726
  source 1..80: mol_type = other DNA

SEQ ID NO: 82058 - DNA, 80 bp, synthetic construct; identical to SEQ ID NO: 48727
  source 1..80: mol_type = other DNA

SEQ ID NO: 82059 - DNA, 80 bp, synthetic construct; identical to SEQ ID NO: 16038
  source 1..80: mol_type = other DNA

SEQ ID NO: 82060 - DNA, 80 bp, synthetic construct; identical to SEQ ID NO: 48729
  source 1..80: mol_type = other DNA

SEQ ID NO: 82061 - DNA, 80 bp, synthetic construct; identical to SEQ ID NO: 48730
  source 1..80: mol_type = other DNA

SEQ ID NO: 82062 - DNA, 80 bp, synthetic construct; identical to SEQ ID NO: 16039
  source 1..80: mol_type = other DNA

SEQ ID NO: 82063 - DNA, 80 bp, synthetic construct; identical to SEQ ID NO: 48732
  source 1..80: mol_type = other DNA

SEQ ID NO: 82064 - DNA, 80 bp, synthetic construct; identical to SEQ ID NO: 48733
  source 1..80: mol_type = other DNA

SEQ ID NO: 82065 - DNA, 80 bp, synthetic construct; identical to SEQ ID NO: 48734
  source 1..80: mol_type = other DNA

SEQ ID NO: 82066 - DNA, 80 bp, synthetic construct; identical to SEQ ID NO: 48735
  source 1..80: mol_type = other DNA

SEQ ID NO: 82067 - DNA, 80 bp, synthetic construct; identical to SEQ ID NO: 16040
  source 1..80: mol_type = other DNA

SEQ ID NO: 82068 - DNA, 80 bp, synthetic construct; identical to SEQ ID NO: 48737
  source 1..80: mol_type = other DNA

SEQ ID NO: 82069 - DNA, 80 bp, synthetic construct; identical to SEQ ID NO: 48738
  source 1..80: mol_type = other DNA

SEQ ID NO: 82070 - DNA, 80 bp, synthetic construct; identical to SEQ ID NO: 16041
  source 1..80: mol_type = other DNA

SEQ ID NO: 82071 - DNA, 80 bp, synthetic construct; identical to SEQ ID NO: 48740
  source 1..80: mol_type = other DNA

SEQ ID NO: 82072 - DNA, 80 bp, synthetic construct; identical to SEQ ID NO: 48741
  source 1..80: mol_type = other DNA

SEQ ID NO: 82073 - DNA, 80 bp, synthetic construct; identical to SEQ ID NO: 48742
  source 1..80: mol_type = other DNA

SEQ ID NO: 82074 - DNA, 80 bp, synthetic construct; identical to SEQ ID NO: 16042
  source 1..80: mol_type = other DNA

SEQ ID NO: 82075 - DNA, 80 bp, synthetic construct; identical to SEQ ID NO: 48744
  source 1..80: mol_type = other DNA

SEQ ID NO: 82076 - DNA, 80 bp, synthetic construct; identical to SEQ ID NO: 48745
  source 1..80: mol_type = other DNA

SEQ ID NO: 82077 - DNA, 80 bp, synthetic construct; identical to SEQ ID NO: 48746
  source 1..80: mol_type = other DNA

SEQ ID NO: 82078 - DNA, 80 bp, synthetic construct; identical to SEQ ID NO: 16043
  source 1..80: mol_type = other DNA

SEQ ID NO: 82079 - DNA, 80 bp, synthetic construct; identical to SEQ ID NO: 48749
  source 1..80: mol_type = other DNA

SEQ ID NO: 82080 - DNA, 80 bp, synthetic construct; identical to SEQ ID NO: 48750
  source 1..80: mol_type = other DNA

SEQ ID NO: 82081 - DNA, 80 bp, synthetic construct; identical to SEQ ID NO: 16044
  source 1..80: mol_type = other DNA

SEQ ID NO: 82082 - DNA, 80 bp, synthetic construct; identical to SEQ ID NO: 48752
  source 1..80: mol_type = other DNA

SEQ ID NO: 82083 - DNA, 80 bp, synthetic construct; identical to SEQ ID NO: 48753
  source 1..80: mol_type = other DNA

SEQ ID NO: 82084 - DNA, 80 bp, synthetic construct; identical to SEQ ID NO: 48754
  source 1..80: mol_type = other DNA

SEQ ID NO: 82085 - DNA, 80 bp, synthetic construct; identical to SEQ ID NO: 48755
  source 1..80: mol_type = other DNA

SEQ ID NO: 82086 - DNA, 80 bp, synthetic construct; identical to SEQ ID NO: 16045
  source 1..80: mol_type = other DNA

SEQ ID NO: 82087 - DNA, 80 bp, synthetic construct; identical to SEQ ID NO: 48757
  source 1..80: mol_type = other DNA

SEQ ID NO: 82088 - DNA, 80 bp, synthetic construct; identical to SEQ ID NO: 48758
  source 1..80: mol_type = other DNA

SEQ ID NO: 82089 - DNA, 80 bp, synthetic construct; identical to SEQ ID NO: 16046
  source 1..80: mol_type = other DNA

SEQ ID NO: 82090 - DNA, 80 bp, synthetic construct; identical to SEQ ID NO: 48760
  source 1..80: mol_type = other DNA

SEQ ID NO: 82091 - DNA, 80 bp, synthetic construct; identical to SEQ ID NO: 48761
  source 1..80: mol_type = other DNA

SEQ ID NO: 82092 - DNA, 80 bp, synthetic construct; identical to SEQ ID NO: 48762
  source 1..80: mol_type = other DNA

SEQ ID NO: 82093 - DNA, 80 bp, synthetic construct; identical to SEQ ID NO: 48763
  source 1..80: mol_type = other DNA

SEQ ID NO: 82094 - DNA, 80 bp, synthetic construct; identical to SEQ ID NO: 48764
  source 1..80: mol_type = other DNA

SEQ ID NO: 82095 - DNA, 80 bp, synthetic construct; identical to SEQ ID NO: 16047
  source 1..80: mol_type = other DNA

SEQ ID NO: 82096 - DNA, 80 bp, synthetic construct; identical to SEQ ID NO: 48766
  source 1..80: mol_type = other DNA

SEQ ID NO: 82097 - DNA, 80 bp, synthetic construct; identical to SEQ ID NO: 48767
  source 1..80: mol_type = other DNA

SEQ ID NO: 82098 - DNA, 80 bp, synthetic construct; identical to SEQ ID NO: 16048
  source 1..80: mol_type = other DNA

SEQ ID NO: 82099 - DNA, 80 bp, synthetic construct; identical to SEQ ID NO: 48769
  source 1..80: mol_type = other DNA

SEQ ID NO: 82100 - DNA, 80 bp, synthetic construct; identical to SEQ ID NO: 48770
  source 1..80: mol_type = other DNA

SEQ ID NO: 82101 - DNA, 80 bp, synthetic construct; identical to SEQ ID NO: 48771
  source 1..80: mol_type = other DNA

SEQ ID NO: 82102 - DNA, 80 bp, synthetic construct; identical to SEQ ID NO: 16049
  source 1..80: mol_type = other DNA

SEQ ID NO: 82103 - DNA, 80 bp, synthetic construct; identical to SEQ ID NO: 48773
  source 1..80: mol_type = other DNA

SEQ ID NO: 82104 - DNA, 80 bp, synthetic construct; identical to SEQ ID NO: 48774
  source 1..80: mol_type = other DNA

SEQ ID NO: 82105 - DNA, 80 bp, synthetic construct; identical to SEQ ID NO: 16050
  source 1..80: mol_type = other DNA

SEQ ID NO: 82106 - DNA, 80 bp, synthetic construct; identical to SEQ ID NO: 48776
  source 1..80: mol_type = other DNA

SEQ ID NO: 82107 - DNA, 80 bp, synthetic construct; identical to SEQ ID NO: 48777
  source 1..80: mol_type = other DNA

SEQ ID NO: 82108 - DNA, 80 bp, synthetic construct; identical to SEQ ID NO: 48778
  source 1..80: mol_type = other DNA

SEQ ID NO: 82109 - DNA, 80 bp, synthetic construct; identical to SEQ ID NO: 16051
  source 1..80: mol_type = other DNA

SEQ ID NO: 82110 - DNA, 80 bp, synthetic construct; identical to SEQ ID NO: 48780
  source 1..80: mol_type = other DNA

SEQ ID NO: 82111 - DNA, 80 bp, synthetic construct; identical to SEQ ID NO: 48781
  source 1..80: mol_type = other DNA

SEQ ID NO: 82112 - DNA, 80 bp, synthetic construct; identical to SEQ ID NO: 48782
  source 1..80: mol_type = other DNA

SEQ ID NO: 82113 - DNA, 80 bp, synthetic construct; identical to SEQ ID NO: 16052
  source 1..80: mol_type = other DNA

SEQ ID NO: 82114 - DNA, 80 bp, synthetic construct; identical to SEQ ID NO: 48784
  source 1..80: mol_type = other DNA

SEQ ID NO: 82115 - DNA, 80 bp, synthetic construct; identical to SEQ ID NO: 48785
  source 1..80: mol_type = other DNA

SEQ ID NO: 82116 - DNA, 80 bp, synthetic construct; identical to SEQ ID NO: 48786
  source 1..80: mol_type = other DNA

SEQ ID NO: 82117 - DNA, 80 bp, synthetic construct; identical to SEQ ID NO: 48787
  source 1..80: mol_type = other DNA

SEQ ID NO: 82118 - DNA, 80 bp, synthetic construct; identical to SEQ ID NO: 16053
  source 1..80: mol_type = other DNA

SEQ ID NO: 82119 - DNA, 80 bp, synthetic construct; identical to SEQ ID NO: 48789
  source 1..80: mol_type = other DNA

SEQ ID NO: 82120 - DNA, 80 bp, synthetic construct; identical to SEQ ID NO: 48790
  source 1..80: mol_type = other DNA

SEQ ID NO: 82121 - DNA, 80 bp, synthetic construct; identical to SEQ ID NO: 16054
  source 1..80: mol_type = other DNA

SEQ ID NO: 82122 - DNA, 80 bp, synthetic construct; identical to SEQ ID NO: 48792
  source 1..80: mol_type = other DNA

SEQ ID NO: 82123 - DNA, 80 bp, synthetic construct; identical to SEQ ID NO: 48793
  source 1..80: mol_type = other DNA

SEQ ID NO: 82124 - DNA, 80 bp, synthetic construct; identical to SEQ ID NO: 48794
  source 1..80: mol_type = other DNA

SEQ ID NO: 82125 - DNA, 80 bp, synthetic construct; identical to SEQ ID NO: 48795
  source 1..80: mol_type = other DNA

SEQ ID NO: 82126 - DNA, 80 bp, synthetic construct; identical to SEQ ID NO: 16055
  source 1..80: mol_type = other DNA

SEQ ID NO: 82127 - DNA, 80 bp, synthetic construct; identical to SEQ ID NO: 48797
  source 1..80: mol_type = other DNA

SEQ ID NO: 82128 - DNA, 80 bp, synthetic construct; identical to SEQ ID NO: 48798
  source 1..80: mol_type = other DNA

SEQ ID NO: 82129 - DNA, 80 bp, synthetic construct; identical to SEQ ID NO: 16056
  source 1..80: mol_type = other DNA

SEQ ID NO: 82130 - DNA, 80 bp, synthetic construct; identical to SEQ ID NO: 48801
  source 1..80: mol_type = other DNA

SEQ ID NO: 82131 - DNA, 80 bp, synthetic construct; identical to SEQ ID NO: 48802
  source 1..80: mol_type = other DNA

SEQ ID NO: 82132 - DNA, 80 bp, synthetic construct; identical to SEQ ID NO: 16057
  source 1..80: mol_type = other DNA

SEQ ID NO: 82133 - DNA, 80 bp, synthetic construct; identical to SEQ ID NO: 48804
  source 1..80: mol_type = other DNA

SEQ ID NO: 82134 - DNA, 80 bp, synthetic construct; identical to SEQ ID NO: 48805
  source 1..80: mol_type = other DNA

SEQ ID NO: 82135 - DNA, 80 bp, synthetic construct; identical to SEQ ID NO: 48806
  source 1..80: mol_type = other DNA

SEQ ID NO: 82136 - DNA, 80 bp, synthetic construct; identical to SEQ ID NO: 16058
  source 1..80: mol_type = other DNA

SEQ ID NO: 82137 - DNA, 80 bp, synthetic construct; identical to SEQ ID NO: 48808
  source 1..80: mol_type = other DNA

SEQ ID NO: 82138 - DNA, 80 bp, synthetic construct; identical to SEQ ID NO: 48809
  source 1..80: mol_type = other DNA

SEQ ID NO: 82139 - DNA, 80 bp, synthetic construct; identical to SEQ ID NO: 48810
  source 1..80: mol_type = other DNA

SEQ ID NO: 82140 - DNA, 80 bp, synthetic construct; identical to SEQ ID NO: 16059
  source 1..80: mol_type = other DNA

SEQ ID NO: 82141 - DNA, 80 bp, synthetic construct; identical to SEQ ID NO: 48812
  source 1..80: mol_type = other DNA

SEQ ID NO: 82142 - DNA, 80 bp, synthetic construct; identical to SEQ ID NO: 48813
  source 1..80: mol_type = other DNA

SEQ ID NO: 82143 - DNA, 80 bp, synthetic construct; identical to SEQ ID NO: 48814
  source 1..80: mol_type = other DNA

SEQ ID NO: 82144 - DNA, 80 bp, synthetic construct; identical to SEQ ID NO: 16060
  source 1..80: mol_type = other DNA

SEQ ID NO: 82145 - DNA, 80 bp, synthetic construct; identical to SEQ ID NO: 48816
  source 1..80: mol_type = other DNA

SEQ ID NO: 82146 - DNA, 80 bp, synthetic construct; identical to SEQ ID NO: 48817
  source 1..80: mol_type = other DNA

SEQ ID NO: 82147 - DNA, 80 bp, synthetic construct; identical to SEQ ID NO: 48818
  source 1..80: mol_type = other DNA

SEQ ID NO: 82148 - DNA, 80 bp, synthetic construct; identical to SEQ ID NO: 16061
  source 1..80: mol_type = other DNA

SEQ ID NO: 82149 - DNA, 80 bp, synthetic construct; identical to SEQ ID NO: 48820
  source 1..80: mol_type = other DNA

SEQ ID NO: 82150 - DNA, 80 bp, synthetic construct; identical to SEQ ID NO: 48821
  source 1..80: mol_type = other DNA

SEQ ID NO: 82151 - DNA, 80 bp, synthetic construct; identical to SEQ ID NO: 48822
  source 1..80: mol_type = other DNA

SEQ ID NO: 82152 - DNA, 80 bp, synthetic construct; identical to SEQ ID NO: 16062
  source 1..80: mol_type = other DNA

SEQ ID NO: 82153 - DNA, 80 bp, synthetic construct; identical to SEQ ID NO: 48824
  source 1..80: mol_type = other DNA

SEQ ID NO: 82154 - DNA, 80 bp, synthetic construct; identical to SEQ ID NO: 48825
  source 1..80: mol_type = other DNA

SEQ ID NO: 82155 - DNA, 80 bp, synthetic construct; identical to SEQ ID NO: 48826
  source 1..80: mol_type = other DNA

SEQ ID NO: 82156 - DNA, 80 bp, synthetic construct; identical to SEQ ID NO: 16063
  source 1..80: mol_type = other DNA

SEQ ID NO: 82157 - DNA, 80 bp, synthetic construct; identical to SEQ ID NO: 48828
  source 1..80: mol_type = other DNA

SEQ ID NO: 82158 - DNA, 80 bp, synthetic construct; identical to SEQ ID NO: 48829
  source 1..80: mol_type = other DNA

SEQ ID NO: 82159 - DNA, 80 bp, synthetic construct; identical to SEQ ID NO: 48830
  source 1..80: mol_type = other DNA

SEQ ID NO: 82160 - DNA, 80 bp, synthetic construct; identical to SEQ ID NO: 48831
  source 1..80: mol_type = other DNA

SEQ ID NO: 82161 - DNA, 80 bp, synthetic construct; identical to SEQ ID NO: 16064
  source 1..80: mol_type = other DNA

SEQ ID NO: 82162 - DNA, 80 bp, synthetic construct; identical to SEQ ID NO: 48833
  source 1..80: mol_type = other DNA

SEQ ID NO: 82163 - DNA, 80 bp, synthetic construct; identical to SEQ ID NO: 48834
  source 1..80: mol_type = other DNA

SEQ ID NO: 82164 - DNA, 80 bp, synthetic construct; identical to SEQ ID NO: 16065
  source 1..80: mol_type = other DNA

SEQ ID NO: 82165 - DNA, 80 bp, synthetic construct; identical to SEQ ID NO: 48836
  source 1..80: mol_type = other DNA

SEQ ID NO: 82166 - DNA, 80 bp, synthetic construct; identical to SEQ ID NO: 48837
  source 1..80: mol_type = other DNA

SEQ ID NO: 82167 - DNA, 80 bp, synthetic construct; identical to SEQ ID NO: 48838
  source 1..80: mol_type = other DNA

SEQ ID NO: 82168 - DNA, 80 bp, synthetic construct; identical to SEQ ID NO: 16066
  source 1..80: mol_type = other DNA

SEQ ID NO: 82169 - DNA, 80 bp, synthetic construct; identical to SEQ ID NO: 48840
  source 1..80: mol_type = other DNA

SEQ ID NO: 82170 - DNA, 80 bp, synthetic construct; identical to SEQ ID NO: 48841
  source 1..80: mol_type = other DNA

SEQ ID NO: 82171 - DNA, 80 bp, synthetic construct; identical to SEQ ID NO: 48842
  source 1..80: mol_type = other DNA

SEQ ID NO: 82172 - DNA, 80 bp, synthetic construct; identical to SEQ ID NO: 16067
  source 1..80: mol_type = other DNA

SEQ ID NO: 82173 - DNA, 80 bp, synthetic construct; identical to SEQ ID NO: 48844
  source 1..80: mol_type = other DNA

SEQ ID NO: 82174 - DNA, 80 bp, synthetic construct; identical to SEQ ID NO: 48845
  source 1..80: mol_type = other DNA

SEQ ID NO: 82175 - DNA, 80 bp, synthetic construct; identical to SEQ ID NO: 48846
  source 1..80: mol_type = other DNA

SEQ ID NO: 82176 - DNA, 80 bp, synthetic construct; identical to SEQ ID NO: 16068
  source 1..80: mol_type = other DNA

SEQ ID NO: 82177 - DNA, 80 bp, synthetic construct; identical to SEQ ID NO: 48848
  source 1..80: mol_type = other DNA

SEQ ID NO: 82178 - DNA, 80 bp, synthetic construct; identical to SEQ ID NO: 48849
  source 1..80: mol_type = other DNA

SEQ ID NO: 82179 - DNA, 80 bp, synthetic construct; identical to SEQ ID NO: 48850
  source 1..80: mol_type = other DNA

SEQ ID NO: 82180 - DNA, 80 bp, synthetic construct; identical to SEQ ID NO: 48851
  source 1..80: mol_type = other DNA

SEQ ID NO: 82181 - DNA, 80 bp, synthetic construct; identical to SEQ ID NO: 16069
  source 1..80: mol_type = other DNA

SEQ ID NO: 82182 - DNA, 80 bp, synthetic construct; identical to SEQ ID NO: 48853
  source 1..80: mol_type = other DNA

SEQ ID NO: 82183 - DNA, 80 bp, synthetic construct; identical to SEQ ID NO: 48854
  source 1..80: mol_type = other DNA

SEQ ID NO: 82184 - DNA, 80 bp, synthetic construct; identical to SEQ ID NO: 16070
  source 1..80: mol_type = other DNA

SEQ ID NO: 82185 - DNA, 80 bp, synthetic construct; identical to SEQ ID NO: 48856
  source 1..80: mol_type = other DNA

SEQ ID NO: 82186 - DNA, 80 bp, synthetic construct; identical to SEQ ID NO: 48857
  source 1..80: mol_type = other DNA

SEQ ID NO: 82187 - DNA, 80 bp, synthetic construct; identical to SEQ ID NO: 48858
  source 1..80: mol_type = other DNA

SEQ ID NO: 82188 - DNA, 80 bp, synthetic construct; identical to SEQ ID NO: 16071
  source 1..80: mol_type = other DNA

SEQ ID NO: 82189 - DNA, 80 bp, synthetic construct; identical to SEQ ID NO: 48860
  source 1..80: mol_type = other DNA

SEQ ID NO: 82190 - DNA, 80 bp, synthetic construct; identical to SEQ ID NO: 48861
  source 1..80: mol_type = other DNA

SEQ ID NO: 82191 - DNA, 80 bp, synthetic construct; identical to SEQ ID NO: 48862
  source 1..80: mol_type = other DNA

SEQ ID NO: 82192 - DNA, 80 bp, synthetic construct; identical to SEQ ID NO: 48863
  source 1..80: mol_type = other DNA

SEQ ID NO: 82193 - DNA, 80 bp, synthetic construct; identical to SEQ ID NO: 16072
  source 1..80: mol_type = other DNA

SEQ ID NO: 82194 - DNA, 80 bp, synthetic construct; identical to SEQ ID NO: 48865
  source 1..80: mol_type = other DNA

SEQ ID NO: 82195 - DNA, 80 bp, synthetic construct; identical to SEQ ID NO: 48866
  source 1..80: mol_type = other DNA

SEQ ID NO: 82196 - DNA, 80 bp, synthetic construct; identical to SEQ ID NO: 48867
  source 1..80: mol_type = other DNA

SEQ ID NO: 82197 - DNA, 80 bp, synthetic construct; identical to SEQ ID NO: 16073
  source 1..80: mol_type = other DNA

SEQ ID NO: 82198 - DNA, 80 bp, synthetic construct; identical to SEQ ID NO: 48870
  source 1..80: mol_type = other DNA

SEQ ID NO: 82199 - DNA, 80 bp, synthetic construct; identical to SEQ ID NO: 48871
  source 1..80: mol_type = other DNA

SEQ ID NO: 82200 - DNA, 80 bp, synthetic construct; identical to SEQ ID NO: 16074
  source 1..80: mol_type = other DNA

SEQ ID NO: 82201 - DNA, 80 bp, synthetic construct; identical to SEQ ID NO: 48873
  source 1..80: mol_type = other DNA

SEQ ID NO: 82202 - DNA, 80 bp, synthetic construct; identical to SEQ ID NO: 48874
  source 1..80: mol_type = other DNA

SEQ ID NO: 82203 - DNA, 80 bp, synthetic construct; identical to SEQ ID NO: 48875
  source 1..80: mol_type = other DNA

SEQ ID NO: 82204 - DNA, 80 bp, synthetic construct; identical to SEQ ID NO: 48876
  source 1..80: mol_type = other DNA

SEQ ID NO: 82205 - DNA, 80 bp, synthetic construct; identical to SEQ ID NO: 16075
  source 1..80: mol_type = other DNA

SEQ ID NO: 82206 - DNA, 80 bp, synthetic construct; identical to SEQ ID NO: 48878
  source 1..80: mol_type = other DNA

SEQ ID NO: 82207 - DNA, 80 bp, synthetic construct; identical to SEQ ID NO: 48879
  source 1..80: mol_type = other DNA

SEQ ID NO: 82208 - DNA, 80 bp, synthetic construct; identical to SEQ ID NO: 16076
  source 1..80: mol_type = other DNA

SEQ ID NO: 82209 - DNA, 80 bp, synthetic construct; identical to SEQ ID NO: 48881
  source 1..80: mol_type = other DNA

SEQ ID NO: 82210 - DNA, 80 bp, synthetic construct; identical to SEQ ID NO: 48882
  source 1..80: mol_type = other DNA

SEQ ID NO: 82211 - DNA, 80 bp, synthetic construct; identical to SEQ ID NO: 48883
  source 1..80: mol_type = other DNA

SEQ ID NO: 82212 - DNA, 80 bp, synthetic construct; identical to SEQ ID NO: 16077
  source 1..80: mol_type = other DNA

SEQ ID NO: 82213 - DNA, 80 bp, synthetic construct; identical to SEQ ID NO: 48885
  source 1..80: mol_type = other DNA

SEQ ID NO: 82214 - DNA, 80 bp, synthetic construct; identical to SEQ ID NO: 48886
  source 1..80: mol_type = other DNA

SEQ ID NO: 82215 - DNA, 80 bp, synthetic construct; identical to SEQ ID NO: 48887
  source 1..80: mol_type = other DNA

SEQ ID NO: 82216 - DNA, 80 bp, synthetic construct; identical to SEQ ID NO: 16078
  source 1..80: mol_type = other DNA

SEQ ID NO: 82217 - DNA, 80 bp, synthetic construct; identical to SEQ ID NO: 48889
  source 1..80: mol_type = other DNA

SEQ ID NO: 82218 - DNA, 80 bp, synthetic construct; identical to SEQ ID NO: 48890
  source 1..80: mol_type = other DNA

SEQ ID NO: 82219 - DNA, 80 bp, synthetic construct; identical to SEQ ID NO: 48891
  source 1..80: mol_type = other DNA

SEQ ID NO: 82220 - DNA, 80 bp, synthetic construct; identical to SEQ ID NO: 16079
  source 1..80: mol_type = other DNA

SEQ ID NO: 82221 - DNA, 80 bp, synthetic construct; identical to SEQ ID NO: 48893
  source 1..80: mol_type = other DNA

SEQ ID NO: 82222 - DNA, 80 bp, synthetic construct; identical to SEQ ID NO: 48894
  source 1..80: mol_type = other DNA

SEQ ID NO: 82223 - DNA, 80 bp, synthetic construct; identical to SEQ ID NO: 48895
  source 1..80: mol_type = other DNA

SEQ ID NO: 82224 - DNA, 80 bp, synthetic construct; identical to SEQ ID NO: 48896
  source 1..80: mol_type = other DNA

SEQ ID NO: 82225 - DNA, 80 bp, synthetic construct; identical to SEQ ID NO: 48897
  source 1..80: mol_type = other DNA

SEQ ID NO: 82226 - DNA, 80 bp, synthetic construct; identical to SEQ ID NO: 48898
  source 1..80: mol_type = other DNA

SEQ ID NO: 82227 - DNA, 80 bp, synthetic construct; identical to SEQ ID NO: 48899
  source 1..80: mol_type = other DNA

SEQ ID NO: 82228 - DNA, 80 bp, synthetic construct; identical to SEQ ID NO: 48900
  source 1..80: mol_type = other DNA

SEQ ID NO: 82229 - DNA, 80 bp, synthetic construct; identical to SEQ ID NO: 16080
  source 1..80: mol_type = other DNA

SEQ ID NO: 82230 - DNA, 80 bp, synthetic construct; identical to SEQ ID NO: 48902
  source 1..80: mol_type = other DNA

SEQ ID NO: 82231 - DNA, 80 bp, synthetic construct; identical to SEQ ID NO: 48903
  source 1..80: mol_type = other DNA

SEQ ID NO: 82232 - DNA, 80 bp, synthetic construct; identical to SEQ ID NO: 48904
  source 1..80: mol_type = other DNA

SEQ ID NO: 82233 - DNA, 80 bp, synthetic construct; identical to SEQ ID NO: 48905
  source 1..80: mol_type = other DNA

SEQ ID NO: 82234 - DNA, 80 bp, synthetic construct; identical to SEQ ID NO: 16081
  source 1..80: mol_type = other DNA

SEQ ID NO: 82235 - DNA, 80 bp, synthetic construct; identical to SEQ ID NO: 48907
  source 1..80: mol_type = other DNA

SEQ ID NO: 82236 - DNA, 80 bp, synthetic construct; identical to SEQ ID NO: 48908
  source 1..80: mol_type = other DNA

SEQ ID NO: 82237 - DNA, 80 bp, synthetic construct; identical to SEQ ID NO: 16082
  source 1..80: mol_type = other DNA

SEQ ID NO: 82238 - DNA, 80 bp, synthetic construct; identical to SEQ ID NO: 48910
  source 1..80: mol_type = other DNA

SEQ ID NO: 82239 - DNA, 80 bp, synthetic construct; identical to SEQ ID NO: 48911
  source 1..80: mol_type = other DNA

SEQ ID NO: 82240 - DNA, 80 bp, synthetic construct; identical to SEQ ID NO: 48912
  source 1..80: mol_type = other DNA

SEQ ID NO: 82241 - DNA, 80 bp, synthetic construct; identical to SEQ ID NO: 16083
  source 1..80: mol_type = other DNA

SEQ ID NO: 82242 - DNA, 80 bp, synthetic construct; identical to SEQ ID NO: 48915
  source 1..80: mol_type = other DNA

SEQ ID NO: 82243 - DNA, 80 bp, synthetic construct; identical to SEQ ID NO: 48916
  source 1..80: mol_type = other DNA

SEQ ID NO: 82244 - DNA, 80 bp, synthetic construct; identical to SEQ ID NO: 48917
  source 1..80: mol_type = other DNA

SEQ ID NO: 82245 - DNA, 80 bp, synthetic construct; identical to SEQ ID NO: 16084
  source 1..80: mol_type = other DNA

SEQ ID NO: 82246 - DNA, 80 bp, synthetic construct; identical to SEQ ID NO: 48919
  source 1..80: mol_type = other DNA

SEQ ID NO: 82247 - DNA, 80 bp, synthetic construct; identical to SEQ ID NO: 48920
  source 1..80: mol_type = other DNA

SEQ ID NO: 82248 - DNA, 80 bp, synthetic construct; identical to SEQ ID NO: 16085
  source 1..80: mol_type = other DNA

SEQ ID NO: 82249 - DNA, 80 bp, synthetic construct; identical to SEQ ID NO: 48922
  source 1..80: mol_type = other DNA

SEQ ID NO: 82250 - DNA, 80 bp, synthetic construct; identical to SEQ ID NO: 48923
  source 1..80: mol_type = other DNA

SEQ ID NO: 82251 - DNA, 80 bp, synthetic construct; identical to SEQ ID NO: 48924
  source 1..80: mol_type = other DNA

SEQ ID NO: 82252 - DNA, 80 bp, synthetic construct; identical to SEQ ID NO: 16086
  source 1..80: mol_type = other DNA

SEQ ID NO: 82253 - DNA, 80 bp, synthetic construct; identical to SEQ ID NO: 48928
  source 1..80: mol_type = other DNA

SEQ ID NO: 82254 - DNA, 80 bp, synthetic construct; identical to SEQ ID NO: 16087
  source 1..80: mol_type = other DNA

SEQ ID NO: 82255 - DNA, 80 bp, synthetic construct; identical to SEQ ID NO: 48930
  source 1..80: mol_type = other DNA

SEQ ID NO: 82256 - DNA, 80 bp, synthetic construct; identical to SEQ ID NO: 48931
  source 1..80: mol_type = other DNA

SEQ ID NO: 82257 - DNA, 80 bp, synthetic construct; identical to SEQ ID NO: 48932
  source 1..80: mol_type = other DNA

SEQ ID NO: 82258 - DNA, 80 bp, synthetic construct; identical to SEQ ID NO: 48933
  source 1..80: mol_type = other DNA

SEQ ID NO: 82259 - DNA, 80 bp, synthetic construct; identical to SEQ ID NO: 16088
  source 1..80: mol_type = other DNA

SEQ ID NO: 82260 - DNA, 80 bp, synthetic construct; identical to SEQ ID NO: 48935
  source 1..80: mol_type = other DNA

SEQ ID NO: 82261 - DNA, 80 bp, synthetic construct; identical to SEQ ID NO: 48936
  source 1..80: mol_type = other DNA

SEQ ID NO: 82262 - DNA, 80 bp, synthetic construct; identical to SEQ ID NO: 16089
  source 1..80: mol_type = other DNA

SEQ ID NO: 82263 - DNA, 80 bp, synthetic construct; identical to SEQ ID NO: 48939
  source 1..80: mol_type = other DNA

SEQ ID NO: 82264 - DNA, 80 bp, synthetic construct; identical to SEQ ID NO: 48940
  source 1..80: mol_type = other DNA

SEQ ID NO: 82265 - DNA, 80 bp, synthetic construct; identical to SEQ ID NO: 16090
  source 1..80: mol_type = other DNA

SEQ ID NO: 82266 - DNA, 80 bp, synthetic construct; identical to SEQ ID NO: 48942
  source 1..80: mol_type = other DNA

SEQ ID NO: 82267 - DNA, 80 bp, synthetic construct; identical to SEQ ID NO: 48943
  source 1..80: mol_type = other DNA

SEQ ID NO: 82268 - DNA, 80 bp, synthetic construct; identical to SEQ ID NO: 48945
  source 1..80: mol_type = other DNA

SEQ ID NO: 82269 - DNA, 80 bp, synthetic construct; identical to SEQ ID NO: 16091
  source 1..80: mol_type = other DNA

SEQ ID NO: 82270 - DNA, 80 bp, synthetic construct; identical to SEQ ID NO: 48947
  source 1..80: mol_type = other DNA

SEQ ID NO: 82271 - DNA, 80 bp, synthetic construct; identical to SEQ ID NO: 48948
  source 1..80: mol_type = other DNA

SEQ ID NO: 82272 - DNA, 80 bp, synthetic construct; identical to SEQ ID NO: 48949
  source 1..80: mol_type = other DNA

SEQ ID NO: 82273 - DNA, 80 bp, synthetic construct; identical to SEQ ID NO: 16092
  source 1..80: mol_type = other DNA

SEQ ID NO: 82274 - DNA, 80 bp, synthetic construct; identical to SEQ ID NO: 48951
  source 1..80: mol_type = other DNA

SEQ ID NO: 82275 - DNA, 80 bp, synthetic construct; identical to SEQ ID NO: 48952
  source 1..80: mol_type = other DNA

SEQ ID NO: 82276 - DNA, 80 bp, synthetic construct; identical to SEQ ID NO: 48953
  source 1..80: mol_type = other DNA

SEQ ID NO: 82277 - DNA, 80 bp, synthetic construct; identical to SEQ ID NO: 16093
  source 1..80: mol_type = other DNA

SEQ ID NO: 82278 - DNA, 80 bp, synthetic construct; identical to SEQ ID NO: 48955
  source 1..80: mol_type = other DNA

SEQ ID NO: 82279 - DNA, 80 bp, synthetic construct; identical to SEQ ID NO: 48956
  source 1..80: mol_type = other DNA

SEQ ID NO: 82280 - DNA, 80 bp, synthetic construct; identical to SEQ ID NO: 48957
  source 1..80: mol_type = other DNA

SEQ ID NO: 82281 - DNA, 80 bp, synthetic construct; identical to SEQ ID NO: 16094
  source 1..80: mol_type = other DNA

SEQ ID NO: 82282 - DNA, 80 bp, synthetic construct; identical to SEQ ID NO: 48959
  source 1..80: mol_type = other DNA

SEQ ID NO: 82283 - DNA, 80 bp, synthetic construct; identical to SEQ ID NO: 16095
  source 1..80: mol_type = other DNA

SEQ ID NO: 82284 - DNA, 80 bp, synthetic construct; identical to SEQ ID NO: 48963
  source 1..80: mol_type = other DNA

SEQ ID NO: 82285 - DNA, 80 bp, synthetic construct; identical to SEQ ID NO: 48965
  source 1..80: mol_type = other DNA

SEQ ID NO: 82286 - DNA, 80 bp, synthetic construct; identical to SEQ ID NO: 16096
  source 1..80: mol_type = other DNA

SEQ ID NO: 82287 - DNA, 80 bp, synthetic construct; identical to SEQ ID NO: 48967
  source 1..80: mol_type = other DNA

SEQ ID NO: 82288 - DNA, 80 bp, synthetic construct; identical to SEQ ID NO: 48968
  source 1..80: mol_type = other DNA

SEQ ID NO: 82289 - DNA, 80 bp, synthetic construct; identical to SEQ ID NO: 48969
  source 1..80: mol_type = other DNA

SEQ ID NO: 82290 - DNA, 80 bp, synthetic construct; identical to SEQ ID NO: 16097
  source 1..80: mol_type = other DNA

SEQ ID NO: 82291 - DNA, 80 bp, synthetic construct; identical to SEQ ID NO: 48971
  source 1..80: mol_type = other DNA

SEQ ID NO: 82292 - DNA, 80 bp, synthetic construct; identical to SEQ ID NO: 48972
  source 1..80: mol_type = other DNA

SEQ ID NO: 82293 - DNA, 80 bp, synthetic construct; identical to SEQ ID NO: 48973
  source 1..80: mol_type = other DNA

SEQ ID NO: 82294 - DNA, 80 bp, synthetic construct; identical to SEQ ID NO: 16098
  source 1..80: mol_type = other DNA

SEQ ID NO: 82295 - DNA, 80 bp, synthetic construct; identical to SEQ ID NO: 48976
  source 1..80: mol_type = other DNA

SEQ ID NO: 82296 - DNA, 80 bp, synthetic construct; identical to SEQ ID NO: 48977
  source 1..80: mol_type = other DNA

SEQ ID NO: 82297 - DNA, 80 bp, synthetic construct; identical to SEQ ID NO: 48978
  source 1..80: mol_type = other DNA

SEQ ID NO: 82298 - DNA, 80 bp, synthetic construct; identical to SEQ ID NO: 16099
  source 1..80: mol_type = other DNA

SEQ ID NO: 82299 - DNA, 80 bp, synthetic construct; identical to SEQ ID NO: 48980
  source 1..80: mol_type = other DNA

SEQ ID NO: 82300 - DNA, 80 bp, synthetic construct; identical to SEQ ID NO: 16100
  source 1..80: mol_type = other DNA

SEQ ID NO: 82301 - DNA, 80 bp, synthetic construct; identical to SEQ ID NO: 48982
  source 1..80: mol_type = other DNA

SEQ ID NO: 82302 - DNA, 80 bp, synthetic construct; identical to SEQ ID NO: 48983
  source 1..80: mol_type = other DNA

SEQ ID NO: 82303 - DNA, 80 bp, synthetic construct; identical to SEQ ID NO: 48984
  source 1..80: mol_type = other DNA

SEQ ID NO: 82304 - DNA, 80 bp, synthetic construct; identical to SEQ ID NO: 16101
  source 1..80: mol_type = other DNA

SEQ ID NO: 82305 - DNA, 80 bp, synthetic construct; identical to SEQ ID NO: 48986
  source 1..80: mol_type = other DNA

SEQ ID NO: 82306 - DNA, 80 bp, synthetic construct; identical to SEQ ID NO: 48987
  source 1..80: mol_type = other DNA

SEQ ID NO: 82307 - DNA, 80 bp, synthetic construct; identical to SEQ ID NO: 48988
  source 1..80: mol_type = other DNA

SEQ ID NO: 82308 - DNA, 80 bp, synthetic construct; identical to SEQ ID NO: 48989
  source 1..80: mol_type = other DNA

SEQ ID NO: 82309 - DNA, 80 bp, synthetic construct; identical to SEQ ID NO: 16102
  source 1..80: mol_type = other DNA

SEQ ID NO: 82310 - DNA, 80 bp, synthetic construct; identical to SEQ ID NO: 48991
  source 1..80: mol_type = other DNA

SEQ ID NO: 82311 - DNA, 80 bp, synthetic construct; identical to SEQ ID NO: 48992
  source 1..80: mol_type = other DNA

SEQ ID NO: 82312 - DNA, 80 bp, synthetic construct; identical to SEQ ID NO: 48993
  source 1..80: mol_type = other DNA

SEQ ID NO: 82313 - DNA, 80 bp, synthetic construct; identical to SEQ ID NO: 16103
  source 1..80: mol_type = other DNA

SEQ ID NO: 82314 - DNA, 80 bp, synthetic construct; identical to SEQ ID NO: 48995
  source 1..80: mol_type = other DNA

SEQ ID NO: 82315 - DNA, 80 bp, synthetic construct; identical to SEQ ID NO: 48996
  source 1..80: mol_type = other DNA

SEQ ID NO: 82316 - DNA, 80 bp, synthetic construct; identical to SEQ ID NO: 48997
  source 1..80: mol_type = other DNA

SEQ ID NO: 82317 - DNA, 80 bp, synthetic construct; identical to SEQ ID NO: 48998
  source 1..80: mol_type = other DNA

SEQ ID NO: 82318 - DNA, 80 bp, synthetic construct; identical to SEQ ID NO: 48999
  source 1..80: mol_type = other DNA

SEQ ID NO: 82319 - DNA, 80 bp, synthetic construct; identical to SEQ ID NO: 49000
  source 1..80: mol_type = other DNA

SEQ ID NO: 82320 - DNA, 80 bp, synthetic construct; identical to SEQ ID NO: 16105
  source 1..80: mol_type = other DNA

SEQ ID NO: 82321 - DNA, 80 bp, synthetic construct; identical to SEQ ID NO: 49002
  source 1..80: mol_type = other DNA

SEQ ID NO: 82322 - DNA, 80 bp, synthetic construct; identical to SEQ ID NO: 49003
  source 1..80: mol_type = other DNA

SEQ ID NO: 82323 - DNA, 80 bp, synthetic construct; identical to SEQ ID NO: 49004
  source 1..80: mol_type = other DNA

SEQ ID NO: 82324 - DNA, 80 bp, synthetic construct; identical to SEQ ID NO: 16106
  source 1..80: mol_type = other DNA

SEQ ID NO: 82325 - DNA, 80 bp, synthetic construct; identical to SEQ ID NO: 49006
  source 1..80: mol_type = other DNA

SEQ ID NO: 82326 - DNA, 80 bp, synthetic construct; identical to SEQ ID NO: 49007
  source 1..80: mol_type = other DNA

SEQ ID NO: 82327 - DNA, 80 bp, synthetic construct; identical to SEQ ID NO: 49008
  source 1..80: mol_type = other DNA

SEQ ID NO: 82328 - DNA, 80 bp, synthetic construct; identical to SEQ ID NO: 49009
  source 1..80: mol_type = other DNA

SEQ ID NO: 82329 - DNA, 80 bp, synthetic construct; identical to SEQ ID NO: 16107
  source 1..80: mol_type = other DNA

SEQ ID NO: 82330 - DNA, 80 bp, synthetic construct; identical to SEQ ID NO: 49011
  source 1..80: mol_type = other DNA

SEQ ID NO: 82331 - DNA, 80 bp, synthetic construct; identical to SEQ ID NO: 49012
  source 1..80: mol_type = other DNA

SEQ ID NO: 82332 - DNA, 80 bp, synthetic construct; identical to SEQ ID NO: 49013
  source 1..80: mol_type = other DNA

SEQ ID NO: 82333 - DNA, 80 bp, synthetic construct; identical to SEQ ID NO: 16108
  source 1..80: mol_type = other DNA

SEQ ID NO: 82334 - DNA, 80 bp, synthetic construct; identical to SEQ ID NO: 49015
  source 1..80: mol_type = other DNA

SEQ ID NO: 82335 - DNA, 80 bp, synthetic construct; identical to SEQ ID NO: 49016
  source 1..80: mol_type = other DNA

SEQ ID NO: 82336 - DNA, 80 bp, synthetic construct; identical to SEQ ID NO: 49017
  source 1..80: mol_type = other DNA

SEQ ID NO: 82337 - DNA, 80 bp, synthetic construct; identical to SEQ ID NO: 16109
  source 1..80: mol_type = other DNA

SEQ ID NO: 82338 - DNA, 80 bp, synthetic construct; identical to SEQ ID NO: 49019
  source 1..80: mol_type = other DNA

SEQ ID NO: 82339 - DNA, 80 bp, synthetic construct; identical to SEQ ID NO: 49020
  source 1..80: mol_type = other DNA

SEQ ID NO: 82340 - DNA, 80 bp, synthetic construct; identical to SEQ ID NO: 49021
  source 1..80: mol_type = other DNA

SEQ ID NO: 82341 - DNA, 80 bp, synthetic construct; identical to SEQ ID NO: 16110
  source 1..80: mol_type = other DNA

SEQ ID NO: 82342 - DNA, 80 bp, synthetic construct; identical to SEQ ID NO: 49023
  source 1..80: mol_type = other DNA

SEQ ID NO: 82343 - DNA, 80 bp, synthetic construct; identical to SEQ ID NO: 49024
  source 1..80: mol_type = other DNA

SEQ ID NO: 82344 - DNA, 80 bp, synthetic construct; identical to SEQ ID NO: 49025
  source 1..80: mol_type = other DNA

SEQ ID NO: 82345 - DNA, 80 bp, synthetic construct; identical to SEQ ID NO: 16111
  source 1..80: mol_type = other DNA

SEQ ID NO: 82346 - DNA, 80 bp, synthetic construct; identical to SEQ ID NO: 49027
  source 1..80: mol_type = other DNA

SEQ ID NO: 82347 - DNA, 80 bp, synthetic construct; identical to SEQ ID NO: 49028
  source 1..80: mol_type = other DNA

SEQ ID NO: 82348 - DNA, 80 bp, synthetic construct; identical to SEQ ID NO: 16112
  source 1..80: mol_type = other DNA

SEQ ID NO: 82349 - DNA, 80 bp, synthetic construct; identical to SEQ ID NO: 49030
  source 1..80: mol_type = other DNA

SEQ ID NO: 82350 - DNA, 80 bp, synthetic construct; identical to SEQ ID NO: 49031
  source 1..80: mol_type = other DNA

SEQ ID NO: 82351 - DNA, 80 bp, synthetic construct; identical to SEQ ID NO: 49032
  source 1..80: mol_type = other DNA

SEQ ID NO: 82352 - DNA, 80 bp, synthetic construct; identical to SEQ ID NO: 49033
  source 1..80: mol_type = other DNA

SEQ ID NO: 82353 - DNA, 80 bp, synthetic construct; identical to SEQ ID NO: 16113
  source 1..80: mol_type = other DNA

SEQ ID NO: 82354 - DNA, 80 bp, synthetic construct; identical to SEQ ID NO: 49035
  source 1..80: mol_type = other DNA

SEQ ID NO: 82355 - DNA, 80 bp, synthetic construct; identical to SEQ ID NO: 49036
  source 1..80: mol_type = other DNA

SEQ ID NO: 82356 - DNA, 80 bp, synthetic construct; identical to SEQ ID NO: 16114
  source 1..80: mol_type = other DNA

SEQ ID NO: 82357 - DNA, 80 bp, synthetic construct; identical to SEQ ID NO: 49038
  source 1..80: mol_type = other DNA

SEQ ID NO: 82358 - DNA, 80 bp, synthetic construct; identical to SEQ ID NO: 49039
  source 1..80: mol_type = other DNA

SEQ ID NO: 82359 - DNA, 80 bp, synthetic construct; identical to SEQ ID NO: 49040
  source 1..80: mol_type = other DNA

SEQ ID NO: 82360 - DNA, 80 bp, synthetic construct; identical to SEQ ID NO: 16115
  source 1..80: mol_type = other DNA

SEQ ID NO: 82361 - DNA, 80 bp, synthetic construct; identical to SEQ ID NO: 49042
  source 1..80: mol_type = other DNA

SEQ ID NO: 82362 - DNA, 80 bp, synthetic construct; identical to SEQ ID NO: 49043
  source 1..80: mol_type = other DNA

SEQ ID NO: 82363 - DNA, 80 bp, synthetic construct; identical to SEQ ID NO: 49044
  source 1..80: mol_type = other DNA

SEQ ID NO: 82364 - DNA, 80 bp, synthetic construct; identical to SEQ ID NO: 49045
  source 1..80: mol_type = other DNA

SEQ ID NO: 82365 - DNA, 80 bp, synthetic construct; identical to SEQ ID NO: 16116
  source 1..80: mol_type = other DNA

SEQ ID NO: 82366 - DNA, 80 bp, synthetic construct; identical to SEQ ID NO: 49047
  source 1..80: mol_type = other DNA

SEQ ID NO: 82367 - DNA, 80 bp, synthetic construct; identical to SEQ ID NO: 49048
  source 1..80: mol_type = other DNA

SEQ ID NO: 82368 - DNA, 80 bp, synthetic construct; identical to SEQ ID NO: 16117
  source 1..80: mol_type = other DNA

SEQ ID NO: 82369 - DNA, 80 bp, synthetic construct; identical to SEQ ID NO: 49050
  source 1..80: mol_type = other DNA

SEQ ID NO: 82370 - DNA, 80 bp, synthetic construct; identical to SEQ ID NO: 49051
  source 1..80: mol_type = other DNA

SEQ ID NO: 82371 - DNA, 80 bp, synthetic construct; identical to SEQ ID NO: 49052
  source 1..80: mol_type = other DNA

SEQ ID NO: 82372 - DNA, 80 bp, synthetic construct; identical to SEQ ID NO: 49053
  source 1..80: mol_type = other DNA

SEQ ID NO: 82373 - DNA, 80 bp, synthetic construct; identical to SEQ ID NO: 16118
  source 1..80: mol_type = other DNA

SEQ ID NO: 82374 - DNA, 80 bp, synthetic construct; identical to SEQ ID NO: 49056
  source 1..80: mol_type = other DNA

SEQ ID NO: 82375 - DNA, 80 bp, synthetic construct; identical to SEQ ID NO: 16119
  source 1..80: mol_type = other DNA

SEQ ID NO: 82376 - DNA, 80 bp, synthetic construct; identical to SEQ ID NO: 49059
  source 1..80: mol_type = other DNA

SEQ ID NO: 82377 - DNA, 80 bp, synthetic construct; identical to SEQ ID NO: 49060
  source 1..80: mol_type = other DNA

SEQ ID NO: 82378 - DNA, 80 bp, synthetic construct; identical to SEQ ID NO: 16120
  source 1..80: mol_type = other DNA

SEQ ID NO: 82379 - DNA, 80 bp, synthetic construct; identical to SEQ ID NO: 49062
  source 1..80: mol_type = other DNA

SEQ ID NO: 82380 - DNA, 80 bp, synthetic construct; identical to SEQ ID NO: 49063
  source 1..80: mol_type = other DNA

SEQ ID NO: 82381 - DNA, 80 bp, synthetic construct; identical to SEQ ID NO: 49064
  source 1..80: mol_type = other DNA

SEQ ID NO: 82382 - DNA, 80 bp, synthetic construct; identical to SEQ ID NO: 49065
  source 1..80: mol_type = other DNA

SEQ ID NO: 82383 - DNA, 80 bp, synthetic construct; identical to SEQ ID NO: 16121
  source 1..80: mol_type = other DNA

SEQ ID NO: 82384 - DNA, 80 bp, synthetic construct; identical to SEQ ID NO: 49067
  source 1..80: mol_type = other DNA

SEQ ID NO: 82385 - DNA, 80 bp, synthetic construct; identical to SEQ ID NO: 49068
  source 1..80: mol_type = other DNA

SEQ ID NO: 82386 - DNA, 80 bp, synthetic construct; identical to SEQ ID NO: 49069
  source 1..80: mol_type = other DNA

SEQ ID NO: 82387 - DNA, 80 bp, synthetic construct; identical to SEQ ID NO: 16122
  source 1..80: mol_type = other DNA

SEQ ID NO: 82388 - DNA, 80 bp, synthetic construct; identical to SEQ ID NO: 49071
  source 1..80: mol_type = other DNA

SEQ ID NO: 82389 - DNA, 80 bp, synthetic construct; identical to SEQ ID NO: 49072
  source 1..80: mol_type = other DNA

SEQ ID NO: 82390 - DNA, 80 bp, synthetic construct; identical to SEQ ID NO: 16123
  source 1..80: mol_type = other DNA

SEQ ID NO: 82391 - DNA, 80 bp, synthetic construct; identical to SEQ ID NO: 49074
  source 1..80: mol_type = other DNA

SEQ ID NO: 82392 - DNA, 80 bp, synthetic construct; identical to SEQ ID NO: 49075
  source 1..80: mol_type = other DNA

SEQ ID NO: 82393 - DNA, 80 bp, synthetic construct; identical to SEQ ID NO: 49076
  source 1..80: mol_type = other DNA

SEQ ID NO: 82394 - DNA, 80 bp, synthetic construct; identical to SEQ ID NO: 49077
  source 1..80: mol_type = other DNA

SEQ ID NO: 82395 - DNA, 80 bp, synthetic construct; identical to SEQ ID NO: 16124
  source 1..80: mol_type = other DNA

SEQ ID NO: 82396 - DNA, 80 bp, synthetic construct; identical to SEQ ID NO: 49079
  source 1..80: mol_type = other DNA

SEQ ID NO: 82397 - DNA, 80 bp, synthetic construct; identical to SEQ ID NO: 49080
  source 1..80: mol_type = other DNA

SEQ ID NO: 82398 - DNA, 80 bp, synthetic construct; identical to SEQ ID NO: 16125
  source 1..80: mol_type = other DNA

SEQ ID NO: 82399 - DNA, 80 bp, synthetic construct; identical to SEQ ID NO: 49083
  source 1..80: mol_type = other DNA

SEQ ID NO: 82400 - DNA, 80 bp, synthetic construct; identical to SEQ ID NO: 49084
  source 1..80: mol_type = other DNA

SEQ ID NO: 82401 - DNA, 80 bp, synthetic construct; identical to SEQ ID NO: 16126
  source 1..80: mol_type = other DNA

SEQ ID NO: 82402 - DNA, 80 bp, synthetic construct; identical to SEQ ID NO: 49086
  source 1..80: mol_type = other DNA

SEQ ID NO: 82403 - DNA, 80 bp, synthetic construct; identical to SEQ ID NO: 49087
  source 1..80: mol_type = other DNA

SEQ ID NO: 82404 - DNA, 80 bp, synthetic construct; identical to SEQ ID NO: 49088
  source 1..80: mol_type = other DNA

SEQ ID NO: 82405 - DNA, 80 bp, synthetic construct; identical to SEQ ID NO: 49089
  source 1..80: mol_type = other DNA

SEQ ID NO: 82406 - DNA, 80 bp, synthetic construct; identical to SEQ ID NO: 16127
  source 1..80: mol_type = other DNA

SEQ ID NO: 82407 - DNA, 80 bp, synthetic construct; identical to SEQ ID NO: 49091
  source 1..80: mol_type = other DNA

SEQ ID NO: 82408 - DNA, 80 bp, synthetic construct; identical to SEQ ID NO: 49092
  source 1..80: mol_type = other DNA

SEQ ID NO: 82409 - DNA, 80 bp, synthetic construct; identical to SEQ ID NO: 16128
  source 1..80: mol_type = other DNA

SEQ ID NO: 82410 - DNA, 80 bp, synthetic construct; identical to SEQ ID NO: 49095
  source 1..80: mol_type = other DNA

SEQ ID NO: 82411 - DNA, 80 bp, synthetic construct; identical to SEQ ID NO: 49096
  source 1..80: mol_type = other DNA

SEQ ID NO: 82412 - DNA, 80 bp, synthetic construct; identical to SEQ ID NO: 16129
  source 1..80: mol_type = other DNA

SEQ ID NO: 82413 - DNA, 80 bp, synthetic construct; identical to SEQ ID NO: 49098
  source 1..80: mol_type = other DNA

SEQ ID NO: 82414 - DNA, 80 bp, synthetic construct; identical to SEQ ID NO: 49099
  source 1..80: mol_type = other DNA

SEQ ID NO: 82415 - DNA, 80 bp, synthetic construct; identical to SEQ ID NO: 49100
  source 1..80: mol_type = other DNA

SEQ ID NO: 82416 - DNA, 80 bp, synthetic construct; identical to SEQ ID NO: 16130
  source 1..80: mol_type = other DNA

SEQ ID NO: 82417 - DNA, 80 bp, synthetic construct; identical to SEQ ID NO: 49102
  source 1..80: mol_type = other DNA

SEQ ID NO: 82418 - DNA, 80 bp, synthetic construct; identical to SEQ ID NO: 49103
  source 1..80: mol_type = other DNA

SEQ ID NO: 82419 - DNA, 80 bp, synthetic construct; identical to SEQ ID NO: 49104
  source 1..80: mol_type = other DNA

SEQ ID NO: 82420 - DNA, 80 bp, synthetic construct; identical to SEQ ID NO: 16131
  source 1..80: mol_type = other DNA

SEQ ID NO: 82421 - DNA, 80 bp, synthetic construct; identical to SEQ ID NO: 49106
  source 1..80: mol_type = other DNA

SEQ ID NO: 82422 - DNA, 80 bp, synthetic construct; identical to SEQ ID NO: 49107
  source 1..80: mol_type = other DNA

SEQ ID NO: 82423 - DNA, 80 bp, synthetic construct; identical to SEQ ID NO: 49108
  source 1..80: mol_type = other DNA

SEQ ID NO: 82424 - DNA, 80 bp, synthetic construct; identical to SEQ ID NO: 16132
  source 1..80: mol_type = other DNA

SEQ ID NO: 82425 - DNA, 80 bp, synthetic construct; identical to SEQ ID NO: 49111
  source 1..80: mol_type = other DNA

SEQ ID NO: 82426 - DNA, 80 bp, synthetic construct; identical to SEQ ID NO: 49112
  source 1..80: mol_type = other DNA

SEQ ID NO: 82427 - DNA, 80 bp, synthetic construct; identical to SEQ ID NO: 49113
  source 1..80: mol_type = other DNA

SEQ ID NO: 82428 - DNA, 80 bp, synthetic construct; identical to SEQ ID NO: 16133
  source 1..80: mol_type = other DNA

SEQ ID NO: 82429 - DNA, 80 bp, synthetic construct; identical to SEQ ID NO: 49115
  source 1..80: mol_type = other DNA

SEQ ID NO: 82430 - DNA, 80 bp, synthetic construct; identical to SEQ ID NO: 49116
  source 1..80: mol_type = other DNA

SEQ ID NO: 82431 - DNA, 80 bp, synthetic construct; identical to SEQ ID NO: 49117
  source 1..80: mol_type = other DNA

SEQ ID NO: 82432 - DNA, 80 bp, synthetic construct; identical to SEQ ID NO: 16134
  source 1..80: mol_type = other DNA

SEQ ID NO: 82433 - DNA, 80 bp, synthetic construct; identical to SEQ ID NO: 49119
  source 1..80: mol_type = other DNA

SEQ ID NO: 82434 - DNA, 80 bp, synthetic construct; identical to SEQ ID NO: 49120
  source 1..80: mol_type = other DNA

SEQ ID NO: 82435 - DNA, 80 bp, synthetic construct; identical to SEQ ID NO: 49121
  source 1..80: mol_type = other DNA

SEQ ID NO: 82436 - DNA, 80 bp, synthetic construct; identical to SEQ ID NO: 16135
  source 1..80: mol_type = other DNA

SEQ ID NO: 82437 - DNA, 80 bp, synthetic construct; identical to SEQ ID NO: 49123
  source 1..80: mol_type = other DNA

SEQ ID NO: 82438 - DNA, 80 bp, synthetic construct; identical to SEQ ID NO: 49124
  source 1..80: mol_type = other DNA

SEQ ID NO: 82439 - DNA, 80 bp, synthetic construct; identical to SEQ ID NO: 49125
  source 1..80: mol_type = other DNA

SEQ ID NO: 82440 - DNA, 80 bp, synthetic construct; identical to SEQ ID NO: 16136
  source 1..80: mol_type = other DNA

SEQ ID NO: 82441 - DNA, 80 bp, synthetic construct; identical to SEQ ID NO: 49127
  source 1..80: mol_type = other DNA

SEQ ID NO: 82442 - DNA, 80 bp, synthetic construct; identical to SEQ ID NO: 49128
  source 1..80: mol_type = other DNA

SEQ ID NO: 82443 - DNA, 80 bp, synthetic construct; identical to SEQ ID NO: 49129
  source 1..80: mol_type = other DNA

SEQ ID NO: 82444 - DNA, 80 bp, synthetic construct; identical to SEQ ID NO: 16137
  source 1..80: mol_type = other DNA

SEQ ID NO: 82445 - DNA, 80 bp, synthetic construct; identical to SEQ ID NO: 49132
  source 1..80: mol_type = other DNA

SEQ ID NO: 82446 - DNA, 80 bp, synthetic construct; identical to SEQ ID NO: 49133
  source 1..80: mol_type = other DNA

SEQ ID NO: 82447 - DNA, 80 bp, synthetic construct; identical to SEQ ID NO: 16138
  source 1..80: mol_type = other DNA

SEQ ID NO: 82448 - DNA, 80 bp, synthetic construct; identical to SEQ ID NO: 49135
  source 1..80: mol_type = other DNA

SEQ ID NO: 82449 - DNA, 80 bp, synthetic construct; identical to SEQ ID NO: 49136
  source 1..80: mol_type = other DNA

SEQ ID NO: 82450 - DNA, 80 bp, synthetic construct; identical to SEQ ID NO: 49137
  source 1..80: mol_type = other DNA

SEQ ID NO: 82451 - DNA, 80 bp, synthetic construct; identical to SEQ ID NO: 16139
  source 1..80: mol_type = other DNA

SEQ ID NO: 82452 - DNA, 80 bp, synthetic construct; identical to SEQ ID NO: 49139
  source 1..80: mol_type = other DNA

SEQ ID NO: 82453 - DNA, 80 bp, synthetic construct; identical to SEQ ID NO: 49140
  source 1..80: mol_type = other DNA

SEQ ID NO: 82454 - DNA, 80 bp, synthetic construct; identical to SEQ ID NO: 49141
  source 1..80: mol_type = other DNA

SEQ ID NO: 82455 - DNA, 80 bp, synthetic construct; identical to SEQ ID NO: 49142
  source 1..80: mol_type = other DNA

SEQ ID NO: 82456 - DNA, 80 bp, synthetic construct; identical to SEQ ID NO: 16140
  source 1..80: mol_type = other DNA

SEQ ID NO: 82457 - DNA, 80 bp, synthetic construct; identical to SEQ ID NO: 49144
  source 1..80: mol_type = other DNA

SEQ ID NO: 82458 - DNA, 80 bp, synthetic construct; identical to SEQ ID NO: 49145
  source 1..80: mol_type = other DNA

SEQ ID NO: 82459 - DNA, 80 bp, synthetic construct; identical to SEQ ID NO: 49146
  source 1..80: mol_type = other DNA

SEQ ID NO: 82460 - DNA, 80 bp, synthetic construct; identical to SEQ ID NO: 16141
  source 1..80: mol_type = other DNA

SEQ ID NO: 82461 - DNA, 80 bp, synthetic construct; identical to SEQ ID NO: 49148
  source 1..80: mol_type = other DNA

SEQ ID NO: 82462 - DNA, 80 bp, synthetic construct; identical to SEQ ID NO: 49150
  source 1..80: mol_type = other DNA

SEQ ID NO: 82463 - DNA, 80 bp, synthetic construct; identical to SEQ ID NO: 16142
  source 1..80: mol_type = other DNA

SEQ ID NO: 82464 - DNA, 80 bp, synthetic construct; identical to SEQ ID NO: 49152
  source 1..80: mol_type = other DNA

SEQ ID NO: 82465 - DNA, 80 bp, synthetic construct; identical to SEQ ID NO: 49153
  source 1..80: mol_type = other DNA

SEQ ID NO: 82466 - DNA, 80 bp, synthetic construct; identical to SEQ ID NO: 49154
  source 1..80: mol_type = other DNA

SEQ ID NO: 82467 - DNA, 80 bp, synthetic construct; identical to SEQ ID NO: 16143
  source 1..80: mol_type = other DNA

SEQ ID NO: 82468 - DNA, 80 bp, synthetic construct; identical to SEQ ID NO: 49156
  source 1..80: mol_type = other DNA

SEQ ID NO: 82469 - DNA, 80 bp, synthetic construct; identical to SEQ ID NO: 49157
  source 1..80: mol_type = other DNA

SEQ ID NO: 82470 - DNA, 80 bp, synthetic construct; identical to SEQ ID NO: 49158
  source 1..80: mol_type = other DNA

SEQ ID NO: 82471 - DNA, 80 bp, synthetic construct; identical to SEQ ID NO: 16144
  source 1..80: mol_type = other DNA

SEQ ID NO: 82472 - DNA, 80 bp, synthetic construct; identical to SEQ ID NO: 49160
  source 1..80: mol_type = other DNA

SEQ ID NO: 82473 - DNA, 80 bp, synthetic construct; identical to SEQ ID NO: 49161
  source 1..80: mol_type = other DNA

SEQ ID NO: 82474 - DNA, 80 bp, synthetic construct; identical to SEQ ID NO: 49162
  source 1..80: mol_type = other DNA

SEQ ID NO: 82475 - DNA, 80 bp, synthetic construct; identical to SEQ ID NO: 16145
  source 1..80: mol_type = other DNA

SEQ ID NO: 82476 - DNA, 80 bp, synthetic construct; identical to SEQ ID NO: 49164
  source 1..80: mol_type = other DNA

SEQ ID NO: 82477 - DNA, 80 bp, synthetic construct; identical to SEQ ID NO: 49165
  source 1..80: mol_type = other DNA

SEQ ID NO: 82478 - DNA, 80 bp, synthetic construct; identical to SEQ ID NO: 49166
  source 1..80: mol_type = other DNA

SEQ ID NO: 82479 - DNA, 80 bp, synthetic construct; identical to SEQ ID NO: 16146
  source 1..80: mol_type = other DNA

SEQ ID NO: 82480 - DNA, 80 bp, synthetic construct; identical to SEQ ID NO: 49168
  source 1..80: mol_type = other DNA

SEQ ID NO: 82481 - DNA, 80 bp, synthetic construct; identical to SEQ ID NO: 49169
  source 1..80: mol_type = other DNA

SEQ ID NO: 82482 - DNA, 80 bp, synthetic construct; identical to SEQ ID NO: 49170
  source 1..80: mol_type = other DNA

SEQ ID NO: 82483 - DNA, 80 bp, synthetic construct; identical to SEQ ID NO: 16147
  source 1..80: mol_type = other DNA

SEQ ID NO: 82484 - DNA, 80 bp, synthetic construct; identical to SEQ ID NO: 49172
  source 1..80: mol_type = other DNA

SEQ ID NO: 82485 - DNA, 80 bp, synthetic construct; identical to SEQ ID NO: 49173
  source 1..80: mol_type = other DNA

SEQ ID NO: 82486 - DNA, 80 bp, synthetic construct; identical to SEQ ID NO: 49174
  source 1..80: mol_type = other DNA

SEQ ID NO: 82487 - DNA, 80 bp, synthetic construct; identical to SEQ ID NO: 16148
  source 1..80: mol_type = other DNA

SEQ ID NO: 82488 - DNA, 80 bp, synthetic construct; identical to SEQ ID NO: 49176
  source 1..80: mol_type = other DNA

SEQ ID NO: 82489 - DNA, 80 bp, synthetic construct; identical to SEQ ID NO: 49177
  source 1..80: mol_type = other DNA

SEQ ID NO: 82490 - DNA, 80 bp, synthetic construct; identical to SEQ ID NO: 49178
  source 1..80: mol_type = other DNA

SEQ ID NO: 82491 - DNA, 80 bp, synthetic construct; identical to SEQ ID NO: 16149
  source 1..80: mol_type = other DNA

SEQ ID NO: 82492 - DNA, 80 bp, synthetic construct; identical to SEQ ID NO: 49180
  source 1..80: mol_type = other DNA

SEQ ID NO: 82493 - DNA, 80 bp, synthetic construct; identical to SEQ ID NO: 49181
  source 1..80: mol_type = other DNA

SEQ ID NO: 82494 - DNA, 80 bp, synthetic construct; identical to SEQ ID NO: 49182
  source 1..80: mol_type = other DNA

SEQ ID NO: 82495 - DNA, 80 bp, synthetic construct; identical to SEQ ID NO: 16150
  source 1..80: mol_type = other DNA

SEQ ID NO: 82496 - DNA, 80 bp, synthetic construct; identical to SEQ ID NO: 49185
  source 1..80: mol_type = other DNA

SEQ ID NO: 82497 - DNA, 80 bp, synthetic construct; identical to SEQ ID NO: 49186
  source 1..80: mol_type = other DNA

SEQ ID NO: 82498 - DNA, 80 bp, synthetic construct; identical to SEQ ID NO: 16151
  source 1..80: mol_type = other DNA

SEQ ID NO: 82499 - DNA, 80 bp, synthetic construct; identical to SEQ ID NO: 49189
  source 1..80: mol_type = other DNA

SEQ ID NO: 82500 - DNA, 80 bp, synthetic construct; identical to SEQ ID NO: 49190
  source 1..80: mol_type = other DNA

SEQ ID NO: 82501 - DNA, 80 bp, synthetic construct; identical to SEQ ID NO: 49192
  source 1..80: mol_type = other DNA

SEQ ID NO: 82502 - DNA, 80 bp, synthetic construct; identical to SEQ ID NO: 49194
  source 1..80: mol_type = other DNA

SEQ ID NO: 82503 - DNA, 80 bp, synthetic construct; identical to SEQ ID NO: 49195
  source 1..80: mol_type = other DNA

SEQ ID NO: 82504 - DNA, 80 bp, synthetic construct; identical to SEQ ID NO: 49197
  source 1..80: mol_type = other DNA

SEQ ID NO: 82505 - DNA, 80 bp, synthetic construct; identical to SEQ ID NO: 16154
  source 1..80: mol_type = other DNA

SEQ ID NO: 82506 - DNA, 80 bp, synthetic construct; identical to SEQ ID NO: 49201
  source 1..80: mol_type = other DNA

SEQ ID NO: 82507 - DNA, 80 bp, synthetic construct; identical to SEQ ID NO: 16155
  source 1..80: mol_type = other DNA

SEQ ID NO: 82508 - DNA, 80 bp, synthetic construct; identical to SEQ ID NO: 12567
  source 1..80: mol_type = other DNA

SEQ ID NO: 82509 - DNA, 80 bp, synthetic construct; identical to SEQ ID NO: 16156
  source 1..80: mol_type = other DNA

SEQ ID NO: 82510 - DNA, 80 bp, synthetic construct; identical to SEQ ID NO: 49209
  source 1..80: mol_type = other DNA

SEQ ID NO: 82511 - DNA, 80 bp, synthetic construct; identical to SEQ ID NO: 49210
  source 1..80: mol_type = other DNA

SEQ ID NO: 82512 - DNA, 80 bp, synthetic construct; identical to SEQ ID NO: 49211
  source 1..80: mol_type = other DNA

SEQ ID NO: 82513 - DNA, 80 bp, synthetic construct; identical to SEQ ID NO: 16157
  source 1..80: mol_type = other DNA

SEQ ID NO: 82514 - DNA, 80 bp, synthetic construct; identical to SEQ ID NO: 49214
  source 1..80: mol_type = other DNA

SEQ ID NO: 82515 - DNA, 80 bp, synthetic construct; identical to SEQ ID NO: 16158
  source 1..80: mol_type = other DNA

SEQ ID NO: 82516 - DNA, 80 bp, synthetic construct; identical to SEQ ID NO: 49216
  source 1..80: mol_type = other DNA

SEQ ID NO: 82517 - DNA, 80 bp, synthetic construct; identical to SEQ ID NO: 49217
  source 1..80: mol_type = other DNA

SEQ ID NO: 82518 - DNA, 80 bp, synthetic construct; identical to SEQ ID NO: 49218
  source 1..80: mol_type = other DNA

SEQ ID NO: 82519 - DNA, 80 bp, synthetic construct; identical to SEQ ID NO: 49219
  source 1..80: mol_type = other DNA

SEQ ID NO: 82520 - DNA, 80 bp, synthetic construct; identical to SEQ ID NO: 16159
  source 1..80: mol_type = other DNA

SEQ ID NO: 82521 - DNA, 80 bp, synthetic construct; identical to SEQ ID NO: 49221
  source 1..80: mol_type = other DNA

SEQ ID NO: 82522 - DNA, 80 bp, synthetic construct; identical to SEQ ID NO: 49222
  source 1..80: mol_type = other DNA

SEQ ID NO: 82523 - DNA, 80 bp, synthetic construct; identical to SEQ ID NO: 49223
  source 1..80: mol_type = other DNA

SEQ ID NO: 82524 - DNA, 80 bp, synthetic construct; identical to SEQ ID NO: 16160
  source 1..80: mol_type = other DNA

SEQ ID NO: 82525 - DNA, 80 bp, synthetic construct; identical to SEQ ID NO: 49225
  source 1..80: mol_type = other DNA

SEQ ID NO: 82526 - DNA, 80 bp, synthetic construct; identical to SEQ ID NO: 49226
  source 1..80: mol_type = other DNA

SEQ ID NO: 82527 - DNA, 80 bp, synthetic construct; identical to SEQ ID NO: 49227
  source 1..80: mol_type = other DNA

SEQ ID NO: 82528 - DNA, 80 bp, synthetic construct; identical to SEQ ID NO: 16161
  source 1..80: mol_type = other DNA

SEQ ID NO: 82529 - DNA, 80 bp, synthetic construct; identical to SEQ ID NO: 49229
  source 1..80: mol_type = other DNA

SEQ ID NO: 82530 - DNA, 80 bp, synthetic construct; identical to SEQ ID NO: 49230
  source 1..80: mol_type = other DNA

SEQ ID NO: 82531 - DNA, 80 bp, synthetic construct; identical to SEQ ID NO: 49231
  source 1..80: mol_type = other DNA

SEQ ID NO: 82532 - DNA, 80 bp, synthetic construct; identical to SEQ ID NO: 16162
  source 1..80: mol_type = other DNA

SEQ ID NO: 82533 - DNA, 80 bp, synthetic construct; identical to SEQ ID NO: 49233
  source 1..80: mol_type = other DNA

SEQ ID NO: 82534 - DNA, 80 bp, synthetic construct; identical to SEQ ID NO: 49234
  source 1..80: mol_type = other DNA

SEQ ID NO: 82535 - DNA, 80 bp, synthetic construct; identical to SEQ ID NO: 49235
  source 1..80: mol_type = other DNA

SEQ ID NO: 82536 - DNA, 80 bp, synthetic construct; identical to SEQ ID NO: 16163
  source 1..80: mol_type = other DNA

SEQ ID NO: 82537 - DNA, 80 bp, synthetic construct; identical to SEQ ID NO: 49237
  source 1..80: mol_type = other DNA

SEQ ID NO: 82538 - DNA, 80 bp, synthetic construct; identical to SEQ ID NO: 49238
  source 1..80: mol_type = other DNA

SEQ ID NO: 82539 - DNA, 80 bp, synthetic construct; identical to SEQ ID NO: 16164
  source 1..80: mol_type = other DNA

SEQ ID NO: 82540 - DNA, 80 bp, synthetic construct; identical to SEQ ID NO: 49240
  source 1..80: mol_type = other DNA

SEQ ID NO: 82541 - DNA, 80 bp, synthetic construct; identical to SEQ ID NO: 49241
  source 1..80: mol_type = other DNA

SEQ ID NO: 82542 - DNA, 80 bp, synthetic construct; identical to SEQ ID NO: 49242
  source 1..80: mol_type = other DNA

SEQ ID NO: 82543 - DNA, 80 bp, synthetic construct; identical to SEQ ID NO: 16165
  source 1..80: mol_type = other DNA

SEQ ID NO: 82544 - DNA, 80 bp, synthetic construct; identical to SEQ ID NO: 49245
  source 1..80: mol_type = other DNA

SEQ ID NO: 82545 - DNA, 80 bp, synthetic construct; identical to SEQ ID NO: 49246
  source 1..80: mol_type = other DNA

SEQ ID NO: 82546 - DNA, 80 bp, synthetic construct; identical to SEQ ID NO: 16166
  source 1..80: mol_type = other DNA

SEQ ID NO: 82547 - DNA, 80 bp, synthetic construct; identical to SEQ ID NO: 49248
  source 1..80: mol_type = other DNA

SEQ ID NO: 82548 - DNA, 80 bp, synthetic construct; identical to SEQ ID NO: 49249
  source 1..80: mol_type = other DNA

SEQ ID NO: 82549 - DNA, 80 bp, synthetic construct; identical to SEQ ID NO: 49250
  source 1..80: mol_type = other DNA

SEQ ID NO: 82550 - DNA, 80 bp, synthetic construct; identical to SEQ ID NO: 16167
  source 1..80: mol_type = other DNA

SEQ ID NO: 82551 - DNA, 80 bp, synthetic construct; identical to SEQ ID NO: 49253
  source 1..80: mol_type = other DNA

SEQ ID NO: 82552 - DNA, 80 bp, synthetic construct; identical to SEQ ID NO: 49254
  source 1..80: mol_type = other DNA

SEQ ID NO: 82553 - DNA, 80 bp, synthetic construct; identical to SEQ ID NO: 16168
  source 1..80: mol_type = other DNA

SEQ ID NO: 82554 - DNA, 80 bp, synthetic construct; identical to SEQ ID NO: 49256
  source 1..80: mol_type = other DNA

SEQ ID NO: 82555 - DNA, 80 bp, synthetic construct; identical to SEQ ID NO: 49257
  source 1..80: mol_type = other DNA

SEQ ID NO: 82556 - DNA, 80 bp, synthetic construct; identical to SEQ ID NO: 49258
  source 1..80: mol_type = other DNA

SEQ ID NO: 82557 - DNA, 80 bp, synthetic construct; identical to SEQ ID NO: 16169
  source 1..80: mol_type = other DNA

SEQ ID NO: 82558 - DNA, 80 bp, synthetic construct; identical to SEQ ID NO: 49260
  source 1..80: mol_type = other DNA

SEQ ID NO: 82559 - DNA, 80 bp, synthetic construct; identical to SEQ ID NO: 49261
  source 1..80: mol_type = other DNA

SEQ ID NO: 82560 - DNA, 80 bp, synthetic construct; identical to SEQ ID NO: 49262
  source 1..80: mol_type = other DNA

SEQ ID NO: 82561 - DNA, 80 bp, synthetic construct; identical to SEQ ID NO: 49263
  source 1..80: mol_type = other DNA

SEQ ID NO: 82562 - DNA, 80 bp, synthetic construct; identical to SEQ ID NO: 16170
  source 1..80: mol_type = other DNA

SEQ ID NO: 82563 - DNA, 80 bp, synthetic construct; identical to SEQ ID NO: 49265
  source 1..80: mol_type = other DNA

SEQ ID NO: 82564 - DNA, 80 bp, synthetic construct; identical to SEQ ID NO: 49266
  source 1..80: mol_type = other DNA

SEQ ID NO: 82565 - DNA, 80 bp, synthetic construct; identical to SEQ ID NO: 16171
  source 1..80: mol_type = other DNA

SEQ ID NO: 82566 - DNA, 80 bp, synthetic construct; identical to SEQ ID NO: 49268
  source 1..80: mol_type = other DNA

SEQ ID NO: 82567 - DNA, 80 bp, synthetic construct; identical to SEQ ID NO: 49269
  source 1..80: mol_type = other DNA

SEQ ID NO: 82568 - DNA, 80 bp, synthetic construct; identical to SEQ ID NO: 49270
  source 1..80: mol_type = other DNA

SEQ ID NO: 82569 - DNA, 80 bp, synthetic construct; identical to SEQ ID NO: 16172
  source 1..80: mol_type = other DNA

SEQ ID NO: 82570 - DNA, 80 bp, synthetic construct; identical to SEQ ID NO: 49272
  source 1..80: mol_type = other DNA

SEQ ID NO: 82571 - DNA, 80 bp, synthetic construct; identical to SEQ ID NO: 49273
  source 1..80: mol_type = other DNA

SEQ ID NO: 82572 - DNA, 80 bp, synthetic construct; identical to SEQ ID NO: 49274
  source 1..80: mol_type = other DNA

SEQ ID NO: 82573 - DNA, 80 bp, synthetic construct; identical to SEQ ID NO: 49275
  source 1..80: mol_type = other DNA

SEQ ID NO: 82574 - DNA, 80 bp, synthetic construct; identical to SEQ ID NO: 16173
  source 1..80: mol_type = other DNA

SEQ ID NO: 82575 - DNA, 80 bp, synthetic construct; identical to SEQ ID NO: 49277
  source 1..80: mol_type = other DNA

SEQ ID NO: 82576 - DNA, 80 bp, synthetic construct; identical to SEQ ID NO: 49278
  source 1..80: mol_type = other DNA

SEQ ID NO: 82577 - DNA, 80 bp, synthetic construct; identical to SEQ ID NO: 49279
  source 1..80: mol_type = other DNA

SEQ ID NO: 82578 - DNA, 80 bp, synthetic construct; identical to SEQ ID NO: 16174
  source 1..80: mol_type = other DNA

SEQ ID NO: 82579 - DNA, 80 bp, synthetic construct; identical to SEQ ID NO: 49281
  source 1..80: mol_type = other DNA

SEQ ID NO: 82580 - DNA, 80 bp, synthetic construct; identical to SEQ ID NO: 49282
  source 1..80: mol_type = other DNA

SEQ ID NO: 82581 - DNA, 80 bp, synthetic construct; identical to SEQ ID NO: 16175
  source 1..80: mol_type = other DNA

SEQ ID NO: 82582 - DNA, 80 bp, synthetic construct; identical to SEQ ID NO: 49284
  source 1..80: mol_type = other DNA

SEQ ID NO: 82583 - DNA, 80 bp, synthetic construct; identical to SEQ ID NO: 49285
  source 1..80: mol_type = other DNA

SEQ ID NO: 82584 - DNA, 80 bp, synthetic construct; identical to SEQ ID NO: 49286
  source 1..80: mol_type = other DNA

SEQ ID NO: 82585 - DNA, 80 bp, synthetic construct; identical to SEQ ID NO: 16176
  source 1..80: mol_type = other DNA

SEQ ID NO: 82586 - DNA, 80 bp, synthetic construct; identical to SEQ ID NO: 49289
  source 1..80: mol_type = other DNA

SEQ ID NO: 82587 - DNA, 80 bp, synthetic construct; identical to SEQ ID NO: 49290
  source 1..80: mol_type = other DNA

SEQ ID NO: 82588 - DNA, 80 bp, synthetic construct; identical to SEQ ID NO: 16177
  source 1..80: mol_type = other DNA

SEQ ID NO: 82589 - DNA, 80 bp, synthetic construct; identical to SEQ ID NO: 49292
  source 1..80: mol_type = other DNA

SEQ ID NO: 82590 - DNA, 80 bp, synthetic construct; identical to SEQ ID NO: 49294
  source 1..80: mol_type = other DNA

SEQ ID NO: 82591 - DNA, 80 bp, synthetic construct; identical to SEQ ID NO: 16178
  source 1..80: mol_type = other DNA

SEQ ID NO: 82592 - DNA, 80 bp, synthetic construct; identical to SEQ ID NO: 49297
  source 1..80: mol_type = other DNA

SEQ ID NO: 82593 - DNA, 80 bp, synthetic construct; identical to SEQ ID NO: 49298
  source 1..80: mol_type = other DNA

SEQ ID NO: 82594 - DNA, 80 bp, synthetic construct; identical to SEQ ID NO: 16179
  source 1..80: mol_type = other DNA

SEQ ID NO: 82595 - DNA, 80 bp, synthetic construct; identical to SEQ ID NO: 49301
  source 1..80: mol_type = other DNA

SEQ ID NO: 82596 - DNA, 80 bp, synthetic construct; identical to SEQ ID NO: 49302
  source 1..80: mol_type = other DNA

SEQ ID NO: 82597 - DNA, 80 bp, synthetic construct; identical to SEQ ID NO: 16180
  source 1..80: mol_type = other DNA

SEQ ID NO: 82598 - DNA, 80 bp, synthetic construct; identical to SEQ ID NO: 49306
  source 1..80: mol_type = other DNA

SEQ ID NO: 82599 - DNA, 80 bp, synthetic construct; identical to SEQ ID NO: 16181
  source 1..80: mol_type = other DNA

SEQ ID NO: 82600 - DNA, 80 bp, synthetic construct; identical to SEQ ID NO: 49310
  source 1..80: mol_type = other DNA

SEQ ID NO: 82601 - DNA, 80 bp, synthetic construct; identical to SEQ ID NO: 12326
  source 1..80: mol_type = other DNA

SEQ ID NO: 82602 - DNA, 80 bp, synthetic construct; identical to SEQ ID NO: 49313
  source 1..80: mol_type = other DNA

SEQ ID NO: 82603 - DNA, 80 bp, synthetic construct; identical to SEQ ID NO: 49315
  source 1..80: mol_type = other DNA

SEQ ID NO: 82604 - DNA, 80 bp, synthetic construct; identical to SEQ ID NO: 49317
  source 1..80: mol_type = other DNA

SEQ ID NO: 82605 - DNA, 80 bp, synthetic construct; identical to SEQ ID NO: 49318
  source 1..80: mol_type = other DNA

SEQ ID NO: 82606 - DNA, 80 bp, synthetic construct; identical to SEQ ID NO: 16184
  source 1..80: mol_type = other DNA

SEQ ID NO: 82607 - DNA, 80 bp, synthetic construct; identical to SEQ ID NO: 49321
  source 1..80: mol_type = other DNA

SEQ ID NO: 82608 - DNA, 80 bp, synthetic construct; identical to SEQ ID NO: 49322
  source 1..80: mol_type = other DNA

SEQ ID NO: 82609 - DNA, 80 bp, synthetic construct; identical to SEQ ID NO: 49323
  source 1..80: mol_type = other DNA

SEQ ID NO: 82610 - DNA, 80 bp, synthetic construct; identical to SEQ ID NO: 49325
  source 1..80: mol_type = other DNA

SEQ ID NO: 82611 - DNA, 80 bp, synthetic construct; identical to SEQ ID NO: 49326
  source 1..80: mol_type = other DNA

SEQ ID NO: 82612 - DNA, 80 bp, synthetic construct; identical to SEQ ID NO: 16186
  source 1..80: mol_type = other DNA

SEQ ID NO: 82613 - DNA, 80 bp, synthetic construct; identical to SEQ ID NO: 49329
  source 1..80: mol_type = other DNA

SEQ ID NO: 82614 - DNA, 80 bp, synthetic construct; identical to SEQ ID NO: 49330
  source 1..80: mol_type = other DNA

SEQ ID NO: 82615 - DNA, 80 bp, synthetic construct; identical to SEQ ID NO: 16187
  source 1..80: mol_type = other DNA

SEQ ID NO: 82616 - DNA, 80 bp, synthetic construct; identical to SEQ ID NO: 49332
  source 1..80: mol_type = other DNA

SEQ ID NO: 82617 - DNA, 80 bp, synthetic construct; identical to SEQ ID NO: 49333
  source 1..80: mol_type = other DNA

SEQ ID NO: 82618 - DNA, 80 bp, synthetic construct; identical to SEQ ID NO: 49334
  source 1..80: mol_type = other DNA

SEQ ID NO: 82619 - DNA, 80 bp, synthetic construct; identical to SEQ ID NO: 16188
  source 1..80: mol_type = other DNA

SEQ ID NO: 82620 - DNA, 80 bp, synthetic construct; identical to SEQ ID NO: 49336
  source 1..80: mol_type = other DNA

SEQ ID NO: 82621 - DNA, 80 bp, synthetic construct; identical to SEQ ID NO: 49337
  source 1..80: mol_type = other DNA

SEQ ID NO: 82622 - DNA, 80 bp, synthetic construct; identical to SEQ ID NO: 49338
  source 1..80: mol_type = other DNA

SEQ ID NO: 82623 - DNA, 80 bp, synthetic construct; identical to SEQ ID NO: 16189
  source 1..80: mol_type = other DNA

SEQ ID NO: 82624 - DNA, 80 bp, synthetic construct; identical to SEQ ID NO: 49340
  source 1..80: mol_type = other DNA

SEQ ID NO: 82625 - DNA, 80 bp, synthetic construct; identical to SEQ ID NO: 49341
  source 1..80: mol_type = other DNA

SEQ ID NO: 82626 - DNA, 80 bp, synthetic construct; identical to SEQ ID NO: 49342
  source 1..80: mol_type = other DNA

SEQ ID NO: 82627 - DNA, 80 bp, synthetic construct; identical to SEQ ID NO: 16190
  source 1..80: mol_type = other DNA

SEQ ID NO: 82628 - DNA, 80 bp, synthetic construct; identical to SEQ ID NO: 49344
  source 1..80: mol_type = other DNA

SEQ ID NO: 82629 - DNA, 80 bp, synthetic construct; identical to SEQ ID NO: 49345
  source 1..80: mol_type = other DNA

SEQ ID NO: 82630 - DNA, 80 bp, synthetic construct; identical to SEQ ID NO: 49346
  source 1..80: mol_type = other DNA

SEQ ID NO: 82631 - DNA, 80 bp, synthetic construct; identical to SEQ ID NO: 16191
  source 1..80: mol_type = other DNA

SEQ ID NO: 82632 - DNA, 80 bp, synthetic construct; identical to SEQ ID NO: 49348
  source 1..80: mol_type = other DNA

SEQ ID NO: 82633 - DNA, 80 bp, synthetic construct; identical to SEQ ID NO: 49349
  source 1..80: mol_type = other DNA

SEQ ID NO: 82634 - DNA, 80 bp, synthetic construct; identical to SEQ ID NO: 49350
  source 1..80: mol_type = other DNA

SEQ ID NO: 82635 - DNA, 80 bp, synthetic construct; identical to SEQ ID NO: 16192
  source 1..80: mol_type = other DNA

SEQ ID NO: 82636 - DNA, 80 bp, synthetic construct; identical to SEQ ID NO: 49352
  source 1..80: mol_type = other DNA

SEQ ID NO: 82637 - DNA, 80 bp, synthetic construct; identical to SEQ ID NO: 49353
  source 1..80: mol_type = other DNA

SEQ ID NO: 82638 - DNA, 80 bp, synthetic construct; identical to SEQ ID NO: 49354
  source 1..80: mol_type = other DNA

SEQ ID NO: 82639 - DNA, 80 bp, synthetic construct; identical to SEQ ID NO: 16193
  source 1..80: mol_type = other DNA

SEQ ID NO: 82640 - DNA, 80 bp, synthetic construct; identical to SEQ ID NO: 49356
  source 1..80: mol_type = other DNA

SEQ ID NO: 82641 - DNA, 80 bp, synthetic construct; identical to SEQ ID NO: 49357
  source 1..80: mol_type = other DNA

SEQ ID NO: 82642 - DNA, 80 bp, synthetic construct; identical to SEQ ID NO: 49358
  source 1..80: mol_type = other DNA

SEQ ID NO: 82643 - DNA, 80 bp, synthetic construct; identical to SEQ ID NO: 49359
  source 1..80: mol_type = other DNA

SEQ ID NO: 82644 - DNA, 80 bp, synthetic construct; identical to SEQ ID NO: 16194
  source 1..80: mol_type = other DNA

SEQ ID NO: 82645 - DNA, 80 bp, synthetic construct; identical to SEQ ID NO: 49361
  source 1..80: mol_type = other DNA

SEQ ID NO: 82646 - DNA, 80 bp, synthetic construct; identical to SEQ ID NO: 49362
  source 1..80: mol_type = other DNA

SEQ ID NO: 82647 - DNA, 80 bp, synthetic construct; identical to SEQ ID NO: 49363
  source 1..80: mol_type = other DNA

SEQ ID NO: 82648 - DNA, 80 bp, synthetic construct; identical to SEQ ID NO: 49364
  source 1..80: mol_type = other DNA

SEQ ID NO: 82649 - DNA, 80 bp, synthetic construct; identical to SEQ ID NO: 16195
  source 1..80: mol_type = other DNA

SEQ ID NO: 82650 - DNA, 80 bp, synthetic construct; identical to SEQ ID NO: 49366
  source 1..80: mol_type = other DNA

SEQ ID NO: 82651 - DNA, 80 bp, synthetic construct; identical to SEQ ID NO: 16196
  source 1..80: mol_type = other DNA

SEQ ID NO: 82652 - DNA, 80 bp, synthetic construct; identical to SEQ ID NO: 49368
  source 1..80: mol_type = other DNA

SEQ ID NO: 82653 - DNA, 80 bp, synthetic construct; identical to SEQ ID NO: 49369
  source 1..80: mol_type = other DNA

SEQ ID NO: 82654 - DNA, 80 bp, synthetic construct; identical to SEQ ID NO: 49370
  source 1..80: mol_type = other DNA

SEQ ID NO: 82655 - DNA, 80 bp, synthetic construct; identical to SEQ ID NO: 16197
  source 1..80: mol_type = other DNA

SEQ ID NO: 82656 - DNA, 80 bp, synthetic construct; identical to SEQ ID NO: 49372
  source 1..80: mol_type = other DNA

SEQ ID NO: 82657 - DNA, 80 bp, synthetic construct; identical to SEQ ID NO: 49373
  source 1..80: mol_type = other DNA

SEQ ID NO: 82658 - DNA, 80 bp, synthetic construct; identical to SEQ ID NO: 49374
  source 1..80: mol_type = other DNA

SEQ ID NO: 82659 - DNA, 80 bp, synthetic construct; identical to SEQ ID NO: 49375
  source 1..80: mol_type = other DNA

SEQ ID NO: 82660 - DNA, 80 bp, synthetic construct; identical to SEQ ID NO: 16198
  source 1..80: mol_type = other DNA

SEQ ID NO: 82661 - DNA, 80 bp, synthetic construct; identical to SEQ ID NO: 49378
  source 1..80: mol_type = other DNA

SEQ ID NO: 82662 - DNA, 80 bp, synthetic construct; identical to SEQ ID NO: 16199
  source 1..80: mol_type = other DNA

SEQ ID NO: 82663 - DNA, 80 bp, synthetic construct; identical to SEQ ID NO: 49380
  source 1..80: mol_type = other DNA

SEQ ID NO: 82664 - DNA, 80 bp, synthetic construct; identical to SEQ ID NO: 49381
  source 1..80: mol_type = other DNA

SEQ ID NO: 82665 - DNA, 80 bp, synthetic construct; identical to SEQ ID NO: 49382
  source 1..80: mol_type = other DNA

SEQ ID NO: 82666 - DNA, 80 bp, synthetic construct; identical to SEQ ID NO: 16200
  source 1..80: mol_type = other DNA

SEQ ID NO: 82667 - DNA, 80 bp, synthetic construct; identical to SEQ ID NO: 49384
  source 1..80: mol_type = other DNA

SEQ ID NO: 82668 - DNA, 80 bp, synthetic construct; identical to SEQ ID NO: 49385
  source 1..80: mol_type = other DNA

SEQ ID NO: 82669 - DNA, 80 bp, synthetic construct; identical to SEQ ID NO: 49386
  source 1..80: mol_type = other DNA

SEQ ID NO: 82670 - DNA, 80 bp, synthetic construct; identical to SEQ ID NO: 49387
  source 1..80: mol_type = other DNA

SEQ ID NO: 82671 - DNA, 80 bp, synthetic construct; identical to SEQ ID NO: 49389
  source 1..80: mol_type = other DNA

SEQ ID NO: 82672 - DNA, 80 bp, synthetic construct; identical to SEQ ID NO: 49390
  source 1..80: mol_type = other DNA

SEQ ID NO: 82673 - DNA, 80 bp, synthetic construct; identical to SEQ ID NO: 49391
  source 1..80: mol_type = other DNA

SEQ ID NO: 82674 - DNA, 80 bp, synthetic construct; identical to SEQ ID NO: 49393
  source 1..80: mol_type = other DNA

SEQ ID NO: 82675 - DNA, 80 bp, synthetic construct; identical to SEQ ID NO: 49395
  source 1..80: mol_type = other DNA

SEQ ID NO: 82676 - DNA, 80 bp, synthetic construct; identical to SEQ ID NO: 49397
  source 1..80: mol_type = other DNA

SEQ ID NO: 82677 - DNA, 80 bp, synthetic construct; identical to SEQ ID NO: 16204
  source 1..80: mol_type = other DNA

SEQ ID NO: 82678 - DNA, 80 bp, synthetic construct; identical to SEQ ID NO: 49400
  source 1..80: mol_type = other DNA

SEQ ID NO: 82679 - DNA, 80 bp, synthetic construct; identical to SEQ ID NO: 49401
  source 1..80: mol_type = other DNA

SEQ ID NO: 82680 - DNA, 80 bp, synthetic construct; identical to SEQ ID NO: 16205
  source 1..80: mol_type = other DNA

SEQ ID NO: 82681 - DNA, 80 bp, synthetic construct; identical to SEQ ID NO: 49404
  source 1..80: mol_type = other DNA

SEQ ID NO: 82682 - DNA, 80 bp, synthetic construct; identical to SEQ ID NO: 49405
  source 1..80: mol_type = other DNA

SEQ ID NO: 82683 - DNA, 80 bp, synthetic construct; identical to SEQ ID NO: 49406
  source 1..80: mol_type = other DNA

SEQ ID NO: 82684 - DNA, 80 bp, synthetic construct; identical to SEQ ID NO: 16206
  source 1..80: mol_type = other DNA

SEQ ID NO: 82685 - DNA, 80 bp, synthetic construct; identical to SEQ ID NO: 49408
  source 1..80: mol_type = other DNA

SEQ ID NO: 82686 - DNA, 80 bp, synthetic construct; identical to SEQ ID NO: 49410
  source 1..80: mol_type = other DNA

SEQ ID NO: 82687 - DNA, 80 bp, synthetic construct; identical to SEQ ID NO: 49411
  source 1..80: mol_type = other DNA

SEQ ID NO: 82688 - DNA, 80 bp, synthetic construct; identical to SEQ ID NO: 16207
  source 1..80: mol_type = other DNA

SEQ ID NO: 82689 - DNA, 80 bp, synthetic construct; identical to SEQ ID NO: 49413
  source 1..80: mol_type = other DNA

SEQ ID NO: 82690 - DNA, 80 bp, synthetic construct; identical to SEQ ID NO: 49414
  source 1..80: mol_type = other DNA

SEQ ID NO: 82691 - DNA, 80 bp, synthetic construct; identical to SEQ ID NO: 49415
  source 1..80: mol_type = other DNA

SEQ ID NO: 82692 - DNA, 80 bp, synthetic construct; identical to SEQ ID NO: 16208
  source 1..80: mol_type = other DNA

SEQ ID NO: 82693 - DNA, 80 bp, synthetic construct; identical to SEQ ID NO: 49417
  source 1..80: mol_type = other DNA

SEQ ID NO: 82694 - DNA, 80 bp, synthetic construct; identical to SEQ ID NO: 49418
  source 1..80: mol_type = other DNA

SEQ ID NO: 82695 - DNA, 80 bp, synthetic construct; identical to SEQ ID NO: 49419
  source 1..80: mol_type = other DNA

SEQ ID NO: 82696 - DNA, 80 bp, synthetic construct; identical to SEQ ID NO: 16209
  source 1..80: mol_type = other DNA

SEQ ID NO: 82697 - DNA, 80 bp, synthetic construct; identical to SEQ ID NO: 49421
  source 1..80: mol_type = other DNA

SEQ ID NO: 82698 - DNA, 80 bp, synthetic construct; identical to SEQ ID NO: 49422
  source 1..80: mol_type = other DNA

SEQ ID NO: 82699 - DNA, 80 bp, synthetic construct; identical to SEQ ID NO: 16210
  source 1..80: mol_type = other DNA

SEQ ID NO: 82700 - DNA, 80 bp, synthetic construct; identical to SEQ ID NO: 49424
  source 1..80: mol_type = other DNA

SEQ ID NO: 82701 - DNA, 80 bp, synthetic construct; identical to SEQ ID NO: 49425
  source 1..80: mol_type = other DNA

SEQ ID NO: 82702 - DNA, 80 bp, synthetic construct; identical to SEQ ID NO: 49426
  source 1..80: mol_type = other DNA

SEQ ID NO: 82703 - DNA, 80 bp, synthetic construct; identical to SEQ ID NO: 49427
  source 1..80: mol_type = other DNA

SEQ ID NO: 82704 - DNA, 80 bp, synthetic construct; identical to SEQ ID NO: 16211
  source 1..80: mol_type = other DNA

SEQ ID NO: 82705 - DNA, 80 bp, synthetic construct; identical to SEQ ID NO: 49429
  source 1..80: mol_type = other DNA

SEQ ID NO: 82706 - DNA, 80 bp, synthetic construct; identical to SEQ ID NO: 49430
  source 1..80: mol_type = other DNA

SEQ ID NO: 82707 - DNA, 80 bp, synthetic construct; identical to SEQ ID NO: 49431
  source 1..80: mol_type = other DNA

SEQ ID NO: 82708 - DNA, 80 bp, synthetic construct; identical to SEQ ID NO: 16212
  source 1..80: mol_type = other DNA

SEQ ID NO: 82709 - DNA, 80 bp, synthetic construct; identical to SEQ ID NO: 49433
  source 1..80: mol_type = other DNA

SEQ ID NO: 82710 - DNA, 80 bp, synthetic construct; identical to SEQ ID NO: 49434
  source 1..80: mol_type = other DNA

SEQ ID NO: 82711 - DNA, 80 bp, synthetic construct; identical to SEQ ID NO: 16213
  source 1..80: mol_type = other DNA

SEQ ID NO: 82712 - DNA, 80 bp, synthetic construct; identical to SEQ ID NO: 49436
  source 1..80: mol_type = other DNA

SEQ ID NO: 82713 - DNA, 80 bp, synthetic construct; identical to SEQ ID NO: 49437
  source 1..80: mol_type = other DNA

SEQ ID NO: 82714 - DNA, 80 bp, synthetic construct; identical to SEQ ID NO: 49438
  source 1..80: mol_type = other DNA

SEQ ID NO: 82715 - DNA, 80 bp, synthetic construct; identical to SEQ ID NO: 16214
  source 1..80: mol_type = other DNA

SEQ ID NO: 82716 - DNA, 80 bp, synthetic construct; identical to SEQ ID NO: 49440
  source 1..80: mol_type = other DNA

SEQ ID NO: 82717 - DNA, 80 bp, synthetic construct; identical to SEQ ID NO: 49441
  source 1..80: mol_type = other DNA

SEQ ID NO: 82718 - DNA, 80 bp, synthetic construct; identical to SEQ ID NO: 49442
  source 1..80: mol_type = other DNA

SEQ ID NO: 82719 - DNA, 80 bp, synthetic construct; identical to SEQ ID NO: 16215
  source 1..80: mol_type = other DNA

SEQ ID NO: 82720 - DNA, 80 bp, synthetic construct; identical to SEQ ID NO: 49444
  source 1..80: mol_type = other DNA

SEQ ID NO: 82721 - DNA, 80 bp, synthetic construct; identical to SEQ ID NO: 49445
  source 1..80: mol_type = other DNA

SEQ ID NO: 82722 - DNA, 80 bp, synthetic construct; identical to SEQ ID NO: 49446
  source 1..80: mol_type = other DNA

SEQ ID NO: 82723 - DNA, 80 bp, synthetic construct; identical to SEQ ID NO: 49447
  source 1..80: mol_type = other DNA

SEQ ID NO: 82724 - DNA, 80 bp, synthetic construct; identical to SEQ ID NO: 16216
  source 1..80: mol_type = other DNA

SEQ ID NO: 82725 - DNA, 80 bp, synthetic construct; identical to SEQ ID NO: 49449
  source 1..80: mol_type = other DNA

SEQ ID NO: 82726 - DNA, 80 bp, synthetic construct; identical to SEQ ID NO: 49450
  source 1..80: mol_type = other DNA

SEQ ID NO: 82727 - DNA, 80 bp, synthetic construct; identical to SEQ ID NO: 16217
  source 1..80: mol_type = other DNA

SEQ ID NO: 82728 - DNA, 80 bp, synthetic construct; identical to SEQ ID NO: 49452
  source 1..80: mol_type = other DNA

SEQ ID NO: 82729 - DNA, 80 bp, synthetic construct; identical to SEQ ID NO: 49453
  source 1..80: mol_type = other DNA

SEQ ID NO: 82730 - DNA, 80 bp, synthetic construct; identical to SEQ ID NO: 49454
  source 1..80: mol_type = other DNA

SEQ ID NO: 82731 - DNA, 80 bp, synthetic construct; identical to SEQ ID NO: 16218
  source 1..80: mol_type = other DNA

SEQ ID NO: 82732 - DNA, 80 bp, synthetic construct; identical to SEQ ID NO: 49456
  source 1..80: mol_type = other DNA

SEQ ID NO: 82733 - DNA, 80 bp, synthetic construct; identical to SEQ ID NO: 49457
  source 1..80: mol_type = other DNA

SEQ ID NO: 82734 - DNA, 80 bp, synthetic construct; identical to SEQ ID NO: 49458
  source 1..80: mol_type = other DNA

SEQ ID NO: 82735 - DNA, 80 bp, synthetic construct; identical to SEQ ID NO: 16219
  source 1..80: mol_type = other DNA

SEQ ID NO: 82736 - DNA, 80 bp, synthetic construct; identical to SEQ ID NO: 49460
  source 1..80: mol_type = other DNA

SEQ ID NO: 82737 - DNA, 80 bp, synthetic construct; identical to SEQ ID NO: 49461
  source 1..80: mol_type = other DNA

SEQ ID NO: 82738 - DNA, 80 bp, synthetic construct; identical to SEQ ID NO: 16220
  source 1..80: mol_type = other DNA

SEQ ID NO: 82739 - DNA, 80 bp, synthetic construct; identical to SEQ ID NO: 49464
  source 1..80: mol_type = other DNA

SEQ ID NO: 82740 - DNA, 80 bp, synthetic construct; identical to SEQ ID NO: 49465
  source 1..80: mol_type = other DNA

SEQ ID NO: 82741 - DNA, 80 bp, synthetic construct; identical to SEQ ID NO: 49466
  source 1..80: mol_type = other DNA

SEQ ID NO: 82742 - DNA, 80 bp, synthetic construct; identical to SEQ ID NO: 16221
  source 1..80: mol_type = other DNA

SEQ ID NO: 82743 - DNA, 80 bp, synthetic construct; identical to SEQ ID NO: 49468
  source 1..80: mol_type = other DNA

SEQ ID NO: 82744 - DNA, 80 bp, synthetic construct; identical to SEQ ID NO: 49469
  source 1..80: mol_type = other DNA

SEQ ID NO: 82745 - DNA, 80 bp, synthetic construct; identical to SEQ ID NO: 49470
  source 1..80: mol_type = other DNA

SEQ ID NO: 82746 - DNA, 80 bp, synthetic construct; identical to SEQ ID NO: 49471
  source 1..80: mol_type = other DNA

SEQ ID NO: 82747 - DNA, 80 bp, synthetic construct; identical to SEQ ID NO: 16222
  source 1..80: mol_type = other DNA

SEQ ID NO: 82748 - DNA, 80 bp, synthetic construct; identical to SEQ ID NO: 49473
  source 1..80: mol_type = other DNA

SEQ ID NO: 82749 - DNA, 80 bp, synthetic construct; identical to SEQ ID NO: 49474
  source 1..80: mol_type = other DNA

SEQ ID NO: 82750 - DNA, 80 bp, synthetic construct; identical to SEQ ID NO: 49475
  source 1..80: mol_type = other DNA

SEQ ID NO: 82751 - DNA, 80 bp, synthetic construct; identical to SEQ ID NO: 16223
  source 1..80: mol_type = other DNA

SEQ ID NO: 82752 - DNA, 80 bp, synthetic construct; identical to SEQ ID NO: 49477
  source 1..80: mol_type = other DNA

SEQ ID NO: 82753 - DNA, 80 bp, synthetic construct; identical to SEQ ID NO: 49478
  source 1..80: mol_type = other DNA

SEQ ID NO: 82754 - DNA, 80 bp, synthetic construct; identical to SEQ ID NO: 16224
  source 1..80: mol_type = other DNA

SEQ ID NO: 82755 - DNA, 80 bp, synthetic construct; identical to SEQ ID NO: 49480
  source 1..80: mol_type = other DNA

SEQ ID NO: 82756 - DNA, 80 bp, synthetic construct; identical to SEQ ID NO: 49481
  source 1..80: mol_type = other DNA

SEQ ID NO: 82757 - DNA, 80 bp, synthetic construct; identical to SEQ ID NO: 49482
  source 1..80: mol_type = other DNA

SEQ ID NO: 82758 - DNA, 80 bp, synthetic construct; identical to SEQ ID NO: 16225
  source 1..80: mol_type = other DNA

SEQ ID NO: 82759 - DNA, 80 bp, synthetic construct; identical to SEQ ID NO: 49484
  source 1..80: mol_type = other DNA

SEQ ID NO: 82760 - DNA, 80 bp, synthetic construct; identical to SEQ ID NO: 49485
  source 1..80: mol_type = other DNA

SEQ ID NO: 82761 - DNA, 80 bp, synthetic construct; identical to SEQ ID NO: 49486
  source 1..80: mol_type = other DNA

SEQ ID NO: 82762 - DNA, 80 bp, synthetic construct; identical to SEQ ID NO: 49487
  source 1..80: mol_type = other DNA

SEQ ID NO: 82763 - DNA, 80 bp, synthetic construct; identical to SEQ ID NO: 16226
  source 1..80: mol_type = other DNA

SEQ ID NO: 82764 - DNA, 80 bp, synthetic construct; identical to SEQ ID NO: 49489
  source 1..80: mol_type = other DNA

SEQ ID NO: 82765 - DNA, 80 bp, synthetic construct; identical to SEQ ID NO: 49490
  source 1..80: mol_type = other DNA

SEQ ID NO: 82766 - DNA, 80 bp, synthetic construct; identical to SEQ ID NO: 49491
  source 1..80: mol_type = other DNA

SEQ ID NO: 82767 - DNA, 80 bp, synthetic construct; identical to SEQ ID NO: 16227
  source 1..80: mol_type = other DNA

SEQ ID NO: 82768 - DNA, 80 bp, synthetic construct; identical to SEQ ID NO: 49493
  source 1..80: mol_type = other DNA

SEQ ID NO: 82769 - DNA, 80 bp, synthetic construct; identical to SEQ ID NO: 49494
  source 1..80: mol_type = other DNA

SEQ ID NO: 82770 - DNA, 80 bp, synthetic construct; identical to SEQ ID NO: 49495
  source 1..80: mol_type = other DNA

SEQ ID NO: 82771 - DNA, 80 bp, synthetic construct; identical to SEQ ID NO: 16228
  source 1..80: mol_type = other DNA

SEQ ID NO: 82772 - DNA, 80 bp, synthetic construct; identical to SEQ ID NO: 49498
  source 1..80: mol_type = other DNA

SEQ ID NO: 82773 - DNA, 80 bp, synthetic construct; identical to SEQ ID NO: 49499
  source 1..80: mol_type = other DNA

SEQ ID NO: 82774 - DNA, 80 bp, synthetic construct; identical to SEQ ID NO: 16229
  source 1..80: mol_type = other DNA

SEQ ID NO: 82775 - DNA, 80 bp, synthetic construct; identical to SEQ ID NO: 49501
  source 1..80: mol_type = other DNA

SEQ ID NO: 82776 - DNA, 80 bp, synthetic construct; identical to SEQ ID NO: 49502
  source 1..80: mol_type = other DNA

SEQ ID NO: 82777 - DNA, 80 bp, synthetic construct; identical to SEQ ID NO: 49503
  source 1..80: mol_type = other DNA

SEQ ID NO: 82778 - DNA, 80 bp, synthetic construct; identical to SEQ ID NO: 49504
  source 1..80: mol_type = other DNA

SEQ ID NO: 82779 - DNA, 80 bp, synthetic construct; identical to SEQ ID NO: 16230
  source 1..80: mol_type = other DNA

SEQ ID NO: 82780 - DNA, 80 bp, synthetic construct; identical to SEQ ID NO: 49506
  source 1..80: mol_type = other DNA

SEQ ID NO: 82781 - DNA, 80 bp, synthetic construct; identical to SEQ ID NO: 49507
  source 1..80: mol_type = other DNA

SEQ ID NO: 82782 - DNA, 80 bp, synthetic construct; identical to SEQ ID NO: 16231
  source 1..80: mol_type = other DNA

SEQ ID NO: 82783 - DNA, 80 bp, synthetic construct; identical to SEQ ID NO: 49509
  source 1..80: mol_type = other DNA

SEQ ID NO: 82784 - DNA, 80 bp, synthetic construct; identical to SEQ ID NO: 49510
  source 1..80: mol_type = other DNA

SEQ ID NO: 82785 - DNA, 80 bp, synthetic construct; identical to SEQ ID NO: 49511
  source 1..80: mol_type = other DNA

SEQ ID NO: 82786 - DNA, 80 bp, synthetic construct; identical to SEQ ID NO: 16232
  source 1..80: mol_type = other DNA

SEQ ID NO: 82787 - DNA, 80 bp, synthetic construct; identical to SEQ ID NO: 49513
  source 1..80: mol_type = other DNA

SEQ ID NO: 82788 - DNA, 80 bp, synthetic construct; identical to SEQ ID NO: 49514
  source 1..80: mol_type = other DNA

SEQ ID NO: 82789 - DNA, 80 bp, synthetic construct; identical to SEQ ID NO: 49515
  source 1..80: mol_type = other DNA

SEQ ID NO: 82790 - DNA, 80 bp, synthetic construct; identical to SEQ ID NO: 49516
  source 1..80: mol_type = other DNA

SEQ ID NO: 82791 - DNA, 80 bp, synthetic construct; identical to SEQ ID NO: 16233
  source 1..80: mol_type = other DNA

SEQ ID NO: 82792 - DNA, 80 bp, synthetic construct; identical to SEQ ID NO: 49518
  source 1..80: mol_type = other DNA

SEQ ID NO: 82793 - DNA, 80 bp, synthetic construct; identical to SEQ ID NO: 49519
  source 1..80: mol_type = other DNA

SEQ ID NO: 82794 - DNA, 80 bp, synthetic construct; identical to SEQ ID NO: 16234
  source 1..80: mol_type = other DNA

SEQ ID NO: 82795 - DNA, 80 bp, synthetic construct; identical to SEQ ID NO: 49521
  source 1..80: mol_type = other DNA

SEQ ID NO: 82796 - DNA, 80 bp, synthetic construct; identical to SEQ ID NO: 49522
  source 1..80: mol_type = other DNA

SEQ ID NO: 82797 - DNA, 80 bp, synthetic construct; identical to SEQ ID NO: 49523
  source 1..80: mol_type = other DNA

SEQ ID NO: 82798 - DNA, 80 bp, synthetic construct; identical to SEQ ID NO: 16235
  source 1..80: mol_type = other DNA

SEQ ID NO: 82799 - DNA, 80 bp, synthetic construct; identical to SEQ ID NO: 49525
  source 1..80: mol_type = other DNA

SEQ ID NO: 82800 - DNA, 80 bp, synthetic construct; identical to SEQ ID NO: 49526
  source 1..80: mol_type = other DNA

SEQ ID NO: 82801 - DNA, 80 bp, synthetic construct; identical to SEQ ID NO: 49527
  source 1..80: mol_type = other DNA

SEQ ID NO: 82802 - DNA, 80 bp, synthetic construct; identical to SEQ ID NO: 16236
  source 1..80: mol_type = other DNA

SEQ ID NO: 82803 - DNA, 80 bp, synthetic construct; identical to SEQ ID NO: 49529
  source 1..80: mol_type = other DNA

SEQ ID NO: 82804 - DNA, 80 bp, synthetic construct; identical to SEQ ID NO: 49530
  source 1..80: mol_type = other DNA

SEQ ID NO: 82805 - DNA, 80 bp, synthetic construct; identical to SEQ ID NO: 49531
  source 1..80: mol_type = other DNA

SEQ ID NO: 82806 - DNA, 80 bp, synthetic construct; identical to SEQ ID NO: 49532
  source 1..80: mol_type = other DNA

SEQ ID NO: 82807 - DNA, 80 bp, synthetic construct; identical to SEQ ID NO: 16237
  source 1..80: mol_type = other DNA

SEQ ID NO: 82808 - DNA, 80 bp, synthetic construct; identical to SEQ ID NO: 49534
  source 1..80: mol_type = other DNA

SEQ ID NO: 82809 - DNA, 80 bp, synthetic construct; identical to SEQ ID NO: 16238
  source 1..80: mol_type = other DNA

SEQ ID NO: 82810 - DNA, 80 bp, synthetic construct; identical to SEQ ID NO: 49536
  source 1..80: mol_type = other DNA

SEQ ID NO: 82811 - DNA, 80 bp, synthetic construct; identical to SEQ ID NO: 49537
  source 1..80: mol_type = other DNA

SEQ ID NO: 82812 - DNA, 80 bp, synthetic construct; identical to SEQ ID NO: 49538
  source 1..80: mol_type = other DNA

SEQ ID NO: 82813 - DNA, 80 bp, synthetic construct; identical to SEQ ID NO: 49539
  source 1..80: mol_type = other DNA

SEQ ID NO: 82814 - DNA, 80 bp, synthetic construct; identical to SEQ ID NO: 16239
  source 1..80: mol_type = other DNA

SEQ ID NO: 82815 - DNA, 80 bp, synthetic construct; identical to SEQ ID NO: 49541
  source 1..80: mol_type = other DNA

SEQ ID NO: 82816 - DNA, 80 bp, synthetic construct; identical to SEQ ID NO: 49542
  source 1..80: mol_type = other DNA

SEQ ID NO: 82817 - DNA, 80 bp, synthetic construct; identical to SEQ ID NO: 16240
  source 1..80: mol_type = other DNA

SEQ ID NO: 82818 - DNA, 80 bp, synthetic construct; identical to SEQ ID NO: 49545
  source 1..80: mol_type = other DNA

SEQ ID NO: 82819 - DNA, 80 bp, synthetic construct; identical to SEQ ID NO: 49546
  source 1..80: mol_type = other DNA

SEQ ID NO: 82820 - DNA, 80 bp, synthetic construct; identical to SEQ ID NO: 49547
  source 1..80: mol_type = other DNA

SEQ ID NO: 82821 - DNA, 80 bp, synthetic construct; identical to SEQ ID NO: 16241
  source 1..80: mol_type = other DNA

SEQ ID NO: 82822 - DNA, 80 bp, synthetic construct; identical to SEQ ID NO: 49549
  source 1..80: mol_type = other DNA

SEQ ID NO: 82823 - DNA, 80 bp, synthetic construct; identical to SEQ ID NO: 49550
  source 1..80: mol_type = other DNA

SEQ ID NO: 82824 - DNA, 80 bp, synthetic construct; identical to SEQ ID NO: 16242
  source 1..80: mol_type = other DNA

SEQ ID NO: 82825 - DNA, 80 bp, synthetic construct; identical to SEQ ID NO: 49552
  source 1..80: mol_type = other DNA

SEQ ID NO: 82826 - DNA, 80 bp, synthetic construct; identical to SEQ ID NO: 49554
  source 1..80: mol_type = other DNA

SEQ ID NO: 82827 - DNA, 80 bp, synthetic construct; identical to SEQ ID NO: 16243
  source 1..80: mol_type = other DNA

SEQ ID NO: 82828 - DNA, 80 bp, synthetic construct; identical to SEQ ID NO: 49556
  source 1..80: mol_type = other DNA

SEQ ID NO: 82829 - DNA, 80 bp, synthetic construct; identical to SEQ ID NO: 49557
  source 1..80: mol_type = other DNA

SEQ ID NO: 82830 - DNA, 80 bp, synthetic construct; identical to SEQ ID NO: 49558
  source 1..80: mol_type = other DNA

SEQ ID NO: 82831 - DNA, 80 bp, synthetic construct; identical to SEQ ID NO: 49559
  source 1..80: mol_type = other DNA

SEQ ID NO: 82832 - DNA, 80 bp, synthetic construct; identical to SEQ ID NO: 16244
  source 1..80: mol_type = other DNA

SEQ ID NO: 82833 - DNA, 80 bp, synthetic construct; identical to SEQ ID NO: 49561
  source 1..80: mol_type = other DNA

SEQ ID NO: 82834 - DNA, 80 bp, synthetic construct; identical to SEQ ID NO: 49562
  source 1..80: mol_type = other DNA

SEQ ID NO: 82835 - DNA, 80 bp, synthetic construct; identical to SEQ ID NO: 49563
  source 1..80: mol_type = other DNA

SEQ ID NO: 82836 - DNA, 80 bp, synthetic construct; identical to SEQ ID NO: 16245
  source 1..80: mol_type = other DNA

SEQ ID NO: 82837 - DNA, 80 bp, synthetic construct; identical to SEQ ID NO: 49565
  source 1..80: mol_type = other DNA

SEQ ID NO: 82838 - DNA, 80 bp, synthetic construct; identical to SEQ ID NO: 49566
  source 1..80: mol_type = other DNA

SEQ ID NO: 82839 - DNA, 80 bp, synthetic construct; identical to SEQ ID NO: 16246
  source 1..80: mol_type = other DNA

SEQ ID NO: 82840 - DNA, 80 bp, synthetic construct; identical to SEQ ID NO: 49568
  source 1..80: mol_type = other DNA

SEQ ID NO: 82841 - DNA, 80 bp, synthetic construct; identical to SEQ ID NO: 49569
  source 1..80: mol_type = other DNA

SEQ ID NO: 82842 - DNA, 80 bp, synthetic construct; identical to SEQ ID NO: 49570
  source 1..80: mol_type = other DNA

SEQ ID NO: 82843 - DNA, 80 bp, synthetic construct; identical to SEQ ID NO: 16247
  source 1..80: mol_type = other DNA

SEQ ID NO: 82844 - DNA, 80 bp, synthetic construct; identical to SEQ ID NO: 49572
  source 1..80: mol_type = other DNA

SEQ ID NO: 82845 - DNA, 80 bp, synthetic construct; identical to SEQ ID NO: 49573
  source 1..80: mol_type = other DNA

SEQ ID NO: 82846 - DNA, 80 bp, synthetic construct; identical to SEQ ID NO: 49574
  source 1..80: mol_type = other DNA

SEQ ID NO: 82847 - DNA, 80 bp, synthetic construct; identical to SEQ ID NO: 16248
  source 1..80: mol_type = other DNA

SEQ ID NO: 82848 - DNA, 80 bp, synthetic construct; identical to SEQ ID NO: 49576
  source 1..80: mol_type = other DNA

SEQ ID NO: 82849 - DNA, 80 bp, synthetic construct; identical to SEQ ID NO: 49577
  source 1..80: mol_type = other DNA

SEQ ID NO: 82850 - DNA, 80 bp, synthetic construct; identical to SEQ ID NO: 49578
  source 1..80: mol_type = other DNA

SEQ ID NO: 82851 - DNA, 80 bp, synthetic construct; identical to SEQ ID NO: 49579
  source 1..80: mol_type = other DNA

SEQ ID NO: 82852 - DNA, 80 bp, synthetic construct; identical to SEQ ID NO: 16249
  source 1..80: mol_type = other DNA

SEQ ID NO: 82853 - DNA, 80 bp, synthetic construct; identical to SEQ ID NO: 49581
  source 1..80: mol_type = other DNA

SEQ ID NO: 82854 - DNA, 80 bp, synthetic construct; identical to SEQ ID NO: 49582
  source 1..80: mol_type = other DNA

SEQ ID NO: 82855 - DNA, 80 bp, synthetic construct; identical to SEQ ID NO: 16250
  source 1..80: mol_type = other DNA

SEQ ID NO: 82856 - DNA, 80 bp, synthetic construct; identical to SEQ ID NO: 49584
  source 1..80: mol_type = other DNA

SEQ ID NO: 82857 - DNA, 80 bp, synthetic construct; identical to SEQ ID NO: 49585
  source 1..80: mol_type = other DNA

SEQ ID NO: 82858 - DNA, 80 bp, synthetic construct; identical to SEQ ID NO: 49586
  source 1..80: mol_type = other DNA

SEQ ID NO: 82859 - DNA, 80 bp, synthetic construct; identical to SEQ ID NO: 16251
  source 1..80: mol_type = other DNA

SEQ ID NO: 82860 - DNA, 80 bp, synthetic construct; identical to SEQ ID NO: 49588
  source 1..80: mol_type = other DNA

SEQ ID NO: 82861 - DNA, 80 bp, synthetic construct; identical to SEQ ID NO: 49589
  source 1..80: mol_type = other DNA

SEQ ID NO: 82862 - DNA, 80 bp, synthetic construct; identical to SEQ ID NO: 49590
  source 1..80: mol_type = other DNA

SEQ ID NO: 82863 - DNA, 80 bp, synthetic construct; identical to SEQ ID NO: 16252
  source 1..80: mol_type = other DNA

SEQ ID NO: 82864 - DNA, 80 bp, synthetic construct; identical to SEQ ID NO: 49592
  source 1..80: mol_type = other DNA

SEQ ID NO: 82865 - DNA, 80 bp, synthetic construct; identical to SEQ ID NO: 16255
  source 1..80: mol_type = other DNA

SEQ ID NO: 82866 - DNA, 80 bp, synthetic construct; identical to SEQ ID NO: 49594
  source 1..80: mol_type = other DNA

SEQ ID NO: 82867 - DNA, 80 bp, synthetic construct; identical to SEQ ID NO: 16253
  source 1..80: mol_type = other DNA

SEQ ID NO: 82868 - DNA, 80 bp, synthetic construct; identical to SEQ ID NO: 49596
  source 1..80: mol_type = other DNA

SEQ ID NO: 82869 - DNA, 80 bp, synthetic construct; identical to SEQ ID NO: 49597
  source 1..80: mol_type = other DNA

SEQ ID NO: 82870 - DNA, 80 bp, synthetic construct; identical to SEQ ID NO: 49598
  source 1..80: mol_type = other DNA

SEQ ID NO: 82871 - DNA, 80 bp, synthetic construct; identical to SEQ ID NO: 16254
  source 1..80: mol_type = other DNA

SEQ ID NO: 82872 - DNA, 80 bp, synthetic construct; identical to SEQ ID NO: 49600
  source 1..80: mol_type = other DNA

SEQ ID NO: 82873 - DNA, 80 bp, synthetic construct; identical to SEQ ID NO: 49601
  source 1..80: mol_type = other DNA

SEQ ID NO: 82874 - DNA, 80 bp, synthetic construct; identical to SEQ ID NO: 16256
  source 1..80: mol_type = other DNA

SEQ ID NO: 82875 - DNA, 80 bp, synthetic construct; identical to SEQ ID NO: 49603
  source 1..80: mol_type = other DNA

SEQ ID NO: 82876 - DNA, 80 bp, synthetic construct; identical to SEQ ID NO: 16257
  source 1..80: mol_type = other DNA

SEQ ID NO: 82877 - DNA, 80 bp, synthetic construct; identical to SEQ ID NO: 49607
  source 1..80: mol_type = other DNA

SEQ ID NO: 82878 - DNA, 80 bp, synthetic construct; identical to SEQ ID NO: 16258
  source 1..80: mol_type = other DNA

SEQ ID NO: 82879 - DNA, 80 bp, synthetic construct; identical to SEQ ID NO: 49611
  source 1..80: mol_type = other DNA

SEQ ID NO: 82880 - DNA, 80 bp, synthetic construct; identical to SEQ ID NO: 49612
  source 1..80: mol_type = other DNA

SEQ ID NO: 82881 - DNA, 80 bp, synthetic construct; identical to SEQ ID NO: 16259
  source 1..80: mol_type = other DNA

SEQ ID NO: 82882 - DNA, 80 bp, synthetic construct; identical to SEQ ID NO: 49616
  source 1..80: mol_type = other DNA

SEQ ID NO: 82883 - DNA, 80 bp, synthetic construct; identical to SEQ ID NO: 16260
  source 1..80: mol_type = other DNA

SEQ ID NO: 82884 - DNA, 80 bp, synthetic construct; identical to SEQ ID NO: 49619
  source 1..80: mol_type = other DNA

SEQ ID NO: 82885 - DNA, 80 bp, synthetic construct; identical to SEQ ID NO: 16261
  source 1..80: mol_type = other DNA

SEQ ID NO: 82886 - DNA, 80 bp, synthetic construct; identical to SEQ ID NO: 49623
  source 1..80: mol_type = other DNA

SEQ ID NO: 82887 - DNA, 80 bp, synthetic construct; identical to SEQ ID NO: 16262
  source 1..80: mol_type = other DNA

SEQ ID NO: 82888 - DNA, 80 bp, synthetic construct; identical to SEQ ID NO: 49627
  source 1..80: mol_type = other DNA

SEQ ID NO: 82889 - DNA, 80 bp, synthetic construct; identical to SEQ ID NO: 16263
  source 1..80: mol_type = other DNA

SEQ ID NO: 82890 - DNA, 80 bp, synthetic construct; identical to SEQ ID NO: 49630
  source 1..80: mol_type = other DNA

SEQ ID NO: 82891 - DNA, 80 bp, synthetic construct; identical to SEQ ID NO: 49631
  source 1..80: mol_type = other DNA

SEQ ID NO: 82892 - DNA, 80 bp, synthetic construct; identical to SEQ ID NO: 49632
  source 1..80: mol_type = other DNA

SEQ ID NO: 82893 - DNA, 80 bp, synthetic construct; identical to SEQ ID NO: 16264
  source 1..80: mol_type = other DNA

SEQ ID NO: 82894 - DNA, 80 bp, synthetic construct; identical to SEQ ID NO: 49634
  source 1..80: mol_type = other DNA

SEQ ID NO: 82895 - DNA, 80 bp, synthetic construct; identical to SEQ ID NO: 49635
  source 1..80: mol_type = other DNA

SEQ ID NO: 82896 - DNA, 80 bp, synthetic construct; identical to SEQ ID NO: 49636
  source 1..80: mol_type = other DNA

SEQ ID NO: 82897 - DNA, 80 bp, synthetic construct; identical to SEQ ID NO: 16265
  source 1..80: mol_type = other DNA

SEQ ID NO: 82898 - DNA, 80 bp, synthetic construct; identical to SEQ ID NO: 49638
  source 1..80: mol_type = other DNA

SEQ ID NO: 82899 - DNA, 80 bp, synthetic construct; identical to SEQ ID NO: 49639
  source 1..80: mol_type = other DNA

SEQ ID NO: 82900 - DNA, 80 bp, synthetic construct; identical to SEQ ID NO: 49640
  source 1..80: mol_type = other DNA

SEQ ID NO: 82901 - DNA, 80 bp, synthetic construct; identical to SEQ ID NO: 49641
  source 1..80: mol_type = other DNA

SEQ ID NO: 82902 - DNA, 80 bp, synthetic construct; identical to SEQ ID NO: 16266
  source 1..80: mol_type = other DNA

SEQ ID NO: 82903 - DNA, 80 bp, synthetic construct; identical to SEQ ID NO: 49643
  source 1..80: mol_type = other DNA

SEQ ID NO: 82904 - DNA, 80 bp, synthetic construct; identical to SEQ ID NO: 49644
  source 1..80: mol_type = other DNA

SEQ ID NO: 82905 - DNA, 80 bp, synthetic construct; identical to SEQ ID NO: 16267
  source 1..80: mol_type = other DNA

SEQ ID NO: 82906 - DNA, 80 bp, synthetic construct; identical to SEQ ID NO: 49646
  source 1..80: mol_type = other DNA

SEQ ID NO: 82907 - DNA, 80 bp, synthetic construct; identical to SEQ ID NO: 49647
  source 1..80: mol_type = other DNA

SEQ ID NO: 82908 - DNA, 80 bp, synthetic construct; identical to SEQ ID NO: 49648
  source 1..80: mol_type = other DNA

SEQ ID NO: 82909 - DNA, 80 bp, synthetic construct; identical to SEQ ID NO: 16268
  source 1..80: mol_type = other DNA

SEQ ID NO: 82910 - DNA, 80 bp, synthetic construct; identical to SEQ ID NO: 49650
  source 1..80: mol_type = other DNA

SEQ ID NO: 82911 - DNA, 80 bp, synthetic construct; identical to SEQ ID NO: 49651
  source 1..80: mol_type = other DNA

SEQ ID NO: 82912 - DNA, 80 bp, synthetic construct; identical to SEQ ID NO: 49652
  source 1..80: mol_type = other DNA

SEQ ID NO: 82913 - DNA, 80 bp, synthetic construct; identical to SEQ ID NO: 16269
  source 1..80: mol_type = other DNA

SEQ ID NO: 82914 - DNA, 80 bp, synthetic construct; identical to SEQ ID NO: 49654
  source 1..80: mol_type = other DNA

SEQ ID NO: 82915 - DNA, 80 bp, synthetic construct; identical to SEQ ID NO: 49655
  source 1..80: mol_type = other DNA

SEQ ID NO: 82916 - DNA, 80 bp, synthetic construct; identical to SEQ ID NO: 49656
  source 1..80: mol_type = other DNA

SEQ ID NO: 82917 - DNA, 80 bp, synthetic construct; identical to SEQ ID NO: 16270
  source 1..80: mol_type = other DNA

SEQ ID NO: 82918 - DNA, 80 bp, synthetic construct; identical to SEQ ID NO: 49658
  source 1..80: mol_type = other DNA

SEQ ID NO: 82919 - DNA, 80 bp, synthetic construct; identical to SEQ ID NO: 49659
  source 1..80: mol_type = other DNA

SEQ ID NO: 82920 - DNA, 80 bp, synthetic construct; identical to SEQ ID NO: 16271
  source 1..80: mol_type = other DNA

SEQ ID NO: 82921 - DNA, 80 bp, synthetic construct; identical to SEQ ID NO: 49661
  source 1..80: mol_type = other DNA

SEQ ID NO: 82922 - DNA, 80 bp, synthetic construct; identical to SEQ ID NO: 49662
  source 1..80: mol_type = other DNA

SEQ ID NO: 82923 - DNA, 80 bp, synthetic construct; identical to SEQ ID NO: 49663
  source 1..80: mol_type = other DNA

SEQ ID NO: 82924 - DNA, 80 bp, synthetic construct; identical to SEQ ID NO: 49664
  source 1..80: mol_type = other DNA

SEQ ID NO: 82925 - DNA, 80 bp, synthetic construct; identical to SEQ ID NO: 16272
  source 1..80: mol_type = other DNA

SEQ ID NO: 82926 - DNA, 80 bp, synthetic construct; identical to SEQ ID NO: 49666
  source 1..80: mol_type = other DNA

SEQ ID NO: 82927 - DNA, 80 bp, synthetic construct; identical to SEQ ID NO: 49667
  source 1..80: mol_type = other DNA

SEQ ID NO: 82928 - DNA, 80 bp, synthetic construct; identical to SEQ ID NO: 16273
  source 1..80: mol_type = other DNA

SEQ ID NO: 82929 - DNA, 80 bp, synthetic construct; identical to SEQ ID NO: 49669
  source 1..80: mol_type = other DNA

SEQ ID NO: 82930 - DNA, 80 bp, synthetic construct; identical to SEQ ID NO: 49671
  source 1..80: mol_type = other DNA

SEQ ID NO: 82931 - DNA, 80 bp, synthetic construct; identical to SEQ ID NO: 49673
  source 1..80: mol_type = other DNA

SEQ ID NO: 82932 - DNA, 80 bp, synthetic construct; identical to SEQ ID NO: 49675
  source 1..80: mol_type = other DNA

SEQ ID NO: 82933 - DNA, 80 bp, synthetic construct; identical to SEQ ID NO: 16275
  source 1..80: mol_type = other DNA

SEQ ID NO: 82934 - DNA, 80 bp, synthetic construct; identical to SEQ ID NO: 49678
  source 1..80: mol_type = other DNA

SEQ ID NO: 82935 - DNA, 80 bp, synthetic construct; identical to SEQ ID NO: 49679
  source 1..80: mol_type = other DNA

SEQ ID NO: 82936 - DNA, 80 bp, synthetic construct; identical to SEQ ID NO: 16276
  source 1..80: mol_type = other DNA

SEQ ID NO: 82937 - DNA, 80 bp, synthetic construct; identical to SEQ ID NO: 49681
  source 1..80: mol_type = other DNA

SEQ ID NO: 82938 - DNA, 80 bp, synthetic construct; identical to SEQ ID NO: 49682
  source 1..80: mol_type = other DNA

SEQ ID NO: 82939 - DNA, 80 bp, synthetic construct; identical to SEQ ID NO: 49684
  source 1..80: mol_type = other DNA

SEQ ID NO: 82940 - DNA, 80 bp, synthetic construct; identical to SEQ ID NO: 16277
  source 1..80: mol_type = other DNA

SEQ ID NO: 82941 - DNA, 80 bp, synthetic construct; identical to SEQ ID NO: 49686
  source 1..80: mol_type = other DNA

SEQ ID NO: 82942 - DNA, 80 bp, synthetic construct; identical to SEQ ID NO: 49687
  source 1..80: mol_type = other DNA

SEQ ID NO: 82943 - DNA, 80 bp, synthetic construct; identical to SEQ ID NO: 16278
  source 1..80: mol_type = other DNA

SEQ ID NO: 82944 - DNA, 80 bp, synthetic construct; identical to SEQ ID NO: 49689
  source 1..80: mol_type = other DNA

SEQ ID NO: 82945 - DNA, 80 bp, synthetic construct; identical to SEQ ID NO: 49690
  source 1..80: mol_type = other DNA

SEQ ID NO: 82946 - DNA, 80 bp, synthetic construct; identical to SEQ ID NO: 49691
  source 1..80: mol_type = other DNA

SEQ ID NO: 82947 - DNA, 80 bp, synthetic construct; identical to SEQ ID NO: 49692
  source 1..80: mol_type = other DNA

SEQ ID NO: 82948 - DNA, 80 bp, synthetic construct; identical to SEQ ID NO: 16279
  source 1..80: mol_type = other DNA

SEQ ID NO: 82949 - DNA, 80 bp, synthetic construct; identical to SEQ ID NO: 49694
  source 1..80: mol_type = other DNA

SEQ ID NO: 82950 - DNA, 80 bp, synthetic construct; identical to SEQ ID NO: 49695
  source 1..80: mol_type = other DNA

SEQ ID NO: 82951 - DNA, 80 bp, synthetic construct; identical to SEQ ID NO: 16280
  source 1..80: mol_type = other DNA

SEQ ID NO: 82952 - DNA, 80 bp, synthetic construct; identical to SEQ ID NO: 49697
  source 1..80: mol_type = other DNA

SEQ ID NO: 82953 - DNA, 80 bp, synthetic construct; identical to SEQ ID NO: 49698
  source 1..80: mol_type = other DNA

SEQ ID NO: 82954 - DNA, 80 bp, synthetic construct; identical to SEQ ID NO: 49699
  source 1..80: mol_type = other DNA

SEQ ID NO: 82955 - DNA, 80 bp, synthetic construct; identical to SEQ ID NO: 16281
  source 1..80: mol_type = other DNA

SEQ ID NO: 82956 - DNA, 80 bp, synthetic construct; identical to SEQ ID NO: 49701
  source 1..80: mol_type = other DNA

SEQ ID NO: 82957 - DNA, 80 bp, synthetic construct; identical to SEQ ID NO: 49702
  source 1..80: mol_type = other DNA

SEQ ID NO: 82958 - DNA, 80 bp, synthetic construct; identical to SEQ ID NO: 49703
  source 1..80: mol_type = other DNA

SEQ ID NO: 82959 - DNA, 80 bp, synthetic construct; identical to SEQ ID NO: 49704
  source 1..80: mol_type = other DNA

SEQ ID NO: 82960 - DNA, 80 bp, synthetic construct; identical to SEQ ID NO: 16282
  source 1..80: mol_type = other DNA

SEQ ID NO: 82961 - DNA, 80 bp, synthetic construct; identical to SEQ ID NO: 49706
  source 1..80: mol_type = other DNA

SEQ ID NO: 82962 - DNA, 80 bp, synthetic construct; identical to SEQ ID NO: 49707
  source 1..80: mol_type = other DNA

SEQ ID NO: 82963 - DNA, 80 bp, synthetic construct; identical to SEQ ID NO: 16283
  source 1..80: mol_type = other DNA

SEQ ID NO: 82964 - DNA, 80 bp, synthetic construct; identical to SEQ ID NO: 49709
  source 1..80: mol_type = other DNA

SEQ ID NO: 82965 - DNA, 80 bp, synthetic construct; identical to SEQ ID NO: 49710
  source 1..80: mol_type = other DNA

SEQ ID NO: 82966 - DNA, 80 bp, synthetic construct; identical to SEQ ID NO: 49711
  source 1..80: mol_type = other DNA

SEQ ID NO: 82967 - DNA, 80 bp, synthetic construct; identical to SEQ ID NO: 16284
  source 1..80: mol_type = other DNA

SEQ ID NO: 82968 - DNA, 80 bp, synthetic construct; identical to SEQ ID NO: 49713
  source 1..80: mol_type = other DNA

SEQ ID NO: 82969 - DNA, 80 bp, synthetic construct; identical to SEQ ID NO: 49715
  source 1..80: mol_type = other DNA

SEQ ID NO: 82970 - DNA, 80 bp, synthetic construct; identical to SEQ ID NO: 16285
  source 1..80: mol_type = other DNA

SEQ ID NO: 82971 - DNA, 80 bp, synthetic construct; identical to SEQ ID NO: 49717
  source 1..80: mol_type = other DNA

SEQ ID NO: 82972 - DNA, 80 bp, synthetic construct; identical to SEQ ID NO: 49718
  source 1..80: mol_type = other DNA

SEQ ID NO: 82973 - DNA, 80 bp, synthetic construct; identical to SEQ ID NO: 49719
  source 1..80: mol_type = other DNA

SEQ ID NO: 82974 - DNA, 80 bp, synthetic construct; identical to SEQ ID NO: 16286
  source 1..80: mol_type = other DNA

SEQ ID NO: 82975 - DNA, 80 bp, synthetic construct; identical to SEQ ID NO: 49721
  source 1..80: mol_type = other DNA

SEQ ID NO: 82976 - DNA, 80 bp, synthetic construct; identical to SEQ ID NO: 49722
  source 1..80: mol_type = other DNA

SEQ ID NO: 82977 - DNA, 80 bp, synthetic construct; identical to SEQ ID NO: 49723
  source 1..80: mol_type = other DNA

SEQ ID NO: 82978 - DNA, 80 bp, synthetic construct; identical to SEQ ID NO: 49724
  source 1..80: mol_type = other DNA

SEQ ID NO: 82979 - DNA, 80 bp, synthetic construct; identical to SEQ ID NO: 16287
  source 1..80: mol_type = other DNA

SEQ ID NO: 82980 - DNA, 80 bp, synthetic construct; identical to SEQ ID NO: 49727
  source 1..80: mol_type = other DNA

SEQ ID NO: 82981 - DNA, 80 bp, synthetic construct; identical to SEQ ID NO: 49729
  source 1..80: mol_type = other DNA

SEQ ID NO: 82982 - DNA, 80 bp, synthetic construct; identical to SEQ ID NO: 16288
  source 1..80: mol_type = other DNA

SEQ ID NO: 82983 - DNA, 80 bp, synthetic construct; identical to SEQ ID NO: 49731
  source 1..80: mol_type = other DNA

SEQ ID NO: 82984 - DNA, 80 bp, synthetic construct; identical to SEQ ID NO: 49732
  source 1..80: mol_type = other DNA

SEQ ID NO: 82985 - DNA, 80 bp, synthetic construct; identical to SEQ ID NO: 49733
  source 1..80: mol_type = other DNA

SEQ ID NO: 82986 - DNA, 80 bp, synthetic construct; identical to SEQ ID NO: 16289
  source 1..80: mol_type = other DNA

SEQ ID NO: 82987 - DNA, 80 bp, synthetic construct; identical to SEQ ID NO: 49735
  source 1..80: mol_type = other DNA

SEQ ID NO: 82988 - DNA, 80 bp, synthetic construct; identical to SEQ ID NO: 49736
  source 1..80: mol_type = other DNA

SEQ ID NO: 82989 - DNA, 80 bp, synthetic construct; identical to SEQ ID NO: 49737
  source 1..80: mol_type = other DNA

SEQ ID NO: 82990 - DNA, 80 bp, synthetic construct; identical to SEQ ID NO: 49738
  source 1..80: mol_type = other DNA

SEQ ID NO: 82991 - DNA, 80 bp, synthetic construct; identical to SEQ ID NO: 16290
  source 1..80: mol_type = other DNA

SEQ ID NO: 82992 - DNA, 80 bp, synthetic construct; identical to SEQ ID NO: 49740
  source 1..80: mol_type = other DNA

SEQ ID NO: 82993 - DNA, 80 bp, synthetic construct; identical to SEQ ID NO: 49741
  source 1..80: mol_type = other DNA

SEQ ID NO: 82994 - DNA, 80 bp, synthetic construct; identical to SEQ ID NO: 16291
  source 1..80: mol_type = other DNA

SEQ ID NO: 82995 - DNA, 80 bp, synthetic construct; identical to SEQ ID NO: 49743
  source 1..80: mol_type = other DNA

SEQ ID NO: 82996 - DNA, 80 bp, synthetic construct; identical to SEQ ID NO: 49744
  source 1..80: mol_type = other DNA

SEQ ID NO: 82997 - DNA, 80 bp, synthetic construct; identical to SEQ ID NO: 49745
  source 1..80: mol_type = other DNA

SEQ ID NO: 82998 - DNA, 80 bp, synthetic construct; identical to SEQ ID NO: 49746
  source 1..80: mol_type = other DNA

SEQ ID NO: 82999 - DNA, 80 bp, synthetic construct; identical to SEQ ID NO: 16292
  source 1..80: mol_type = other DNA

SEQ ID NO: 83000 - DNA, 80 bp, synthetic construct; identical to SEQ ID NO: 49748
  source 1..80: mol_type = other DNA

SEQ ID NO: 83001 - DNA, 80 bp, synthetic construct; identical to SEQ ID NO: 49749
  source 1..80: mol_type = other DNA

SEQ ID NO: 83002 - DNA, 80 bp, synthetic construct; identical to SEQ ID NO: 16293
  source 1..80: mol_type = other DNA

SEQ ID NO: 83003 - DNA, 80 bp, synthetic construct; identical to SEQ ID NO: 49751
  source 1..80: mol_type = other DNA

SEQ ID NO: 83004 - DNA, 80 bp, synthetic construct; identical to SEQ ID NO: 49752
  source 1..80: mol_type = other DNA

SEQ ID NO: 83005 - DNA, 80 bp, synthetic construct; identical to SEQ ID NO: 49753
  source 1..80: mol_type = other DNA

SEQ ID NO: 83006 - DNA, 80 bp, synthetic construct; identical to SEQ ID NO: 49754
  source 1..80: mol_type = other DNA

SEQ ID NO: 83007 - DNA, 80 bp, synthetic construct; identical to SEQ ID NO: 49755
  source 1..80: mol_type = other DNA

SEQ ID NO: 83008 - DNA, 80 bp, synthetic construct; identical to SEQ ID NO: 49756
  source 1..80: mol_type = other DNA

SEQ ID NO: 83009 - DNA, 80 bp, synthetic construct; identical to SEQ ID NO: 49757
  source 1..80: mol_type = other DNA

SEQ ID NO: 83010 - DNA, 80 bp, synthetic construct; identical to SEQ ID NO: 16294
  source 1..80: mol_type = other DNA

SEQ ID NO: 83011 - DNA, 80 bp, synthetic construct; identical to SEQ ID NO: 49760
  source 1..80: mol_type = other DNA

SEQ ID NO: 83012 - DNA, 80 bp, synthetic construct; identical to SEQ ID NO: 49761
  source 1..80: mol_type = other DNA

SEQ ID NO: 83013 - DNA, 80 bp, synthetic construct; identical to SEQ ID NO: 49762
  source 1..80: mol_type = other DNA

SEQ ID NO: 83014 - DNA, 80 bp, synthetic construct; identical to SEQ ID NO: 49763
  source 1..80: mol_type = other DNA

SEQ ID NO: 83015 - DNA, 80 bp, synthetic construct; identical to SEQ ID NO: 16295
  source 1..80: mol_type = other DNA

SEQ ID NO: 83016 - DNA, 80 bp, synthetic construct; identical to SEQ ID NO: 49765
  source 1..80: mol_type = other DNA

SEQ ID NO: 83017 - DNA, 80 bp, synthetic construct; identical to SEQ ID NO: 49766
  source 1..80: mol_type = other DNA

SEQ ID NO: 83018 - DNA, 80 bp, synthetic construct; identical to SEQ ID NO: 16296
  source 1..80: mol_type = other DNA

SEQ ID NO: 83019 - DNA, 80 bp, synthetic construct; identical to SEQ ID NO: 49768
  source 1..80: mol_type = other DNA

SEQ ID NO: 83020 - DNA, 80 bp, synthetic construct; identical to SEQ ID NO: 49769
  source 1..80: mol_type = other DNA

SEQ ID NO: 83021 - DNA, 80 bp, synthetic construct; identical to SEQ ID NO: 49770
  source 1..80: mol_type = other DNA

SEQ ID NO: 83022 - DNA, 80 bp, synthetic construct; identical to SEQ ID NO: 16297
  source 1..80: mol_type = other DNA

SEQ ID NO: 83023 - DNA, 80 bp, synthetic construct; identical to SEQ ID NO: 49772
  source 1..80: mol_type = other DNA

SEQ ID NO: 83024 - DNA, 80 bp, synthetic construct; identical to SEQ ID NO: 49773
  source 1..80: mol_type = other DNA

SEQ ID NO: 83025 - DNA, 80 bp, synthetic construct; identical to SEQ ID NO: 16298
  source 1..80: mol_type = other DNA

SEQ ID NO: 83026 - DNA, 80 bp, synthetic construct; identical to SEQ ID NO: 49775
  source 1..80: mol_type = other DNA

SEQ ID NO: 83027 - DNA, 80 bp, synthetic construct; identical to SEQ ID NO: 49776
  source 1..80: mol_type = other DNA

SEQ ID NO: 83028 - DNA, 80 bp, synthetic construct; identical to SEQ ID NO: 49777
  source 1..80: mol_type = other DNA

SEQ ID NO: 83029 - DNA, 80 bp, synthetic construct; identical to SEQ ID NO: 49778
  source 1..80: mol_type = other DNA

SEQ ID NO: 83030 - DNA, 80 bp, synthetic construct; identical to SEQ ID NO: 16299
  source 1..80: mol_type = other DNA

SEQ ID NO: 83031 - DNA, 80 bp, synthetic construct; identical to SEQ ID NO: 49780
  source 1..80: mol_type = other DNA

SEQ ID NO: 83032 - DNA, 80 bp, synthetic construct; identical to SEQ ID NO: 49781
  source 1..80: mol_type = other DNA

SEQ ID NO: 83033 - DNA, 80 bp, synthetic construct; identical to SEQ ID NO: 49782
  source 1..80: mol_type = other DNA

SEQ ID NO: 83034 - DNA, 80 bp, synthetic construct; identical to SEQ ID NO: 16300
  source 1..80: mol_type = other DNA

SEQ ID NO: 83035 - DNA, 80 bp, synthetic construct; identical to SEQ ID NO: 49784
  source 1..80: mol_type = other DNA

SEQ ID NO: 83036 - DNA, 80 bp, synthetic construct; identical to SEQ ID NO: 49785
  source 1..80: mol_type = other DNA

SEQ ID NO: 83037 - DNA, 80 bp, synthetic construct; identical to SEQ ID NO: 49786
  source 1..80: mol_type = other DNA

SEQ ID NO: 83038 - DNA, 80 bp, synthetic construct; identical to SEQ ID NO: 16301
  source 1..80: mol_type = other DNA

SEQ ID NO: 83039 - DNA, 80 bp, synthetic construct; identical to SEQ ID NO: 49788
  source 1..80: mol_type = other DNA

SEQ ID NO: 83040 - DNA, 80 bp, synthetic construct; identical to SEQ ID NO: 49789
  source 1..80: mol_type = other DNA

SEQ ID NO: 83041 - DNA, 80 bp, synthetic construct; identical to SEQ ID NO: 49790
  source 1..80: mol_type = other DNA

SEQ ID NO: 83042 - DNA, 80 bp, synthetic construct; identical to SEQ ID NO: 16302
  source 1..80: mol_type = other DNA

SEQ ID NO: 83043 - DNA, 80 bp, synthetic construct; identical to SEQ ID NO: 49792
  source 1..80: mol_type = other DNA

SEQ ID NO: 83044 - DNA, 80 bp, synthetic construct; identical to SEQ ID NO: 49793
  source 1..80: mol_type = other DNA

SEQ ID NO: 83045 - DNA, 80 bp, synthetic construct; identical to SEQ ID NO: 49794
  source 1..80: mol_type = other DNA

SEQ ID NO: 83046 - DNA, 80 bp, synthetic construct; identical to SEQ ID NO: 16303
  source 1..80: mol_type = other DNA

SEQ ID NO: 83047 - DNA, 80 bp, synthetic construct; identical to SEQ ID NO: 49796
  source 1..80: mol_type = other DNA

SEQ ID NO: 83048 - DNA, 80 bp, synthetic construct; identical to SEQ ID NO: 49797
  source 1..80: mol_type = other DNA

SEQ ID NO: 83049 - DNA, 80 bp, synthetic construct; identical to SEQ ID NO: 49798
  source 1..80: mol_type = other DNA

SEQ ID NO: 83050 - DNA, 80 bp, synthetic construct; identical to SEQ ID NO: 16304
  source 1..80: mol_type = other DNA

SEQ ID NO: 83051 - DNA, 80 bp, synthetic construct; identical to SEQ ID NO: 49800
  source 1..80: mol_type = other DNA

SEQ ID NO: 83052 - DNA, 80 bp, synthetic construct; identical to SEQ ID NO: 49801
  source 1..80: mol_type = other DNA

SEQ ID NO: 83053 - DNA, 80 bp, synthetic construct; identical to SEQ ID NO: 49802
  source 1..80: mol_type = other DNA

SEQ ID NO: 83054 - DNA, 80 bp, synthetic construct; identical to SEQ ID NO: 16305
  source 1..80: mol_type = other DNA

SEQ ID NO: 83055 - DNA, 80 bp, synthetic construct; identical to SEQ ID NO: 49805
  source 1..80: mol_type = other DNA

SEQ ID NO: 83056 - DNA, 80 bp, synthetic construct; identical to SEQ ID NO: 16306
  source 1..80: mol_type = other DNA

SEQ ID NO: 83057 - DNA, 80 bp, synthetic construct; identical to SEQ ID NO: 49807
  source 1..80: mol_type = other DNA

SEQ ID NO: 83058 - DNA, 80 bp, synthetic construct; identical to SEQ ID NO: 49808
  source 1..80: mol_type = other DNA

SEQ ID NO: 83059 - DNA, 80 bp, synthetic construct; identical to SEQ ID NO: 49809
  source 1..80: mol_type = other DNA

SEQ ID NO: 83060 - DNA, 80 bp, synthetic construct; identical to SEQ ID NO: 16307
  source 1..80: mol_type = other DNA

SEQ ID NO: 83061 - DNA, 80 bp, synthetic construct; identical to SEQ ID NO: 49811
  source 1..80: mol_type = other DNA

SEQ ID NO: 83062 - DNA, 80 bp, synthetic construct; identical to SEQ ID NO: 49812
  source 1..80: mol_type = other DNA

SEQ ID NO: 83063 - DNA, 80 bp, synthetic construct; identical to SEQ ID NO: 49813
  source 1..80: mol_type = other DNA

SEQ ID NO: 83064 - DNA, 80 bp, synthetic construct; identical to SEQ ID NO: 16308
  source 1..80: mol_type = other DNA

SEQ ID NO: 83065 - DNA, 80 bp, synthetic construct; identical to SEQ ID NO: 49815
  source 1..80: mol_type = other DNA

SEQ ID NO: 83066 - DNA, 80 bp, synthetic construct; identical to SEQ ID NO: 49816
  source 1..80: mol_type = other DNA

SEQ ID NO: 83067 - DNA, 80 bp, synthetic construct; identical to SEQ ID NO: 49817
  source 1..80: mol_type = other DNA

SEQ ID NO: 83068 - DNA, 80 bp, synthetic construct; identical to SEQ ID NO: 49818
  source 1..80: mol_type = other DNA

SEQ ID NO: 83069 - DNA, 80 bp, synthetic construct; identical to SEQ ID NO: 16309
  source 1..80: mol_type = other DNA

SEQ ID NO: 83070 - DNA, 80 bp, synthetic construct; identical to SEQ ID NO: 49820
  source 1..80: mol_type = other DNA

SEQ ID NO: 83071 - DNA, 80 bp, synthetic construct; identical to SEQ ID NO: 49821
  source 1..80: mol_type = other DNA

SEQ ID NO: 83072 - DNA, 80 bp, synthetic construct; identical to SEQ ID NO: 16310
  source 1..80: mol_type = other DNA

SEQ ID NO: 83073 - DNA, 80 bp, synthetic construct; identical to SEQ ID NO: 49823
  source 1..80: mol_type = other DNA

SEQ ID NO: 83074 - DNA, 80 bp, synthetic construct; identical to SEQ ID NO: 49824
  source 1..80: mol_type = other DNA

SEQ ID NO: 83075 - DNA, 80 bp, synthetic construct; identical to SEQ ID NO: 49825
  source 1..80: mol_type = other DNA

SEQ ID NO: 83076 - DNA, 80 bp, synthetic construct; identical to SEQ ID NO: 49826
  source 1..80: mol_type = other DNA

SEQ ID NO: 83077 - DNA, 80 bp, synthetic construct; identical to SEQ ID NO: 16311
  source 1..80: mol_type = other DNA

SEQ ID NO: 83078 - DNA, 80 bp, synthetic construct; identical to SEQ ID NO: 49828
  source 1..80: mol_type = other DNA

SEQ ID NO: 83079 - DNA, 80 bp, synthetic construct; identical to SEQ ID NO: 49829
  source 1..80: mol_type = other DNA

SEQ ID NO: 83080 - DNA, 80 bp, synthetic construct; identical to SEQ ID NO: 49830
  source 1..80: mol_type = other DNA

SEQ ID NO: 83081 - DNA, 80 bp, synthetic construct; identical to SEQ ID NO: 16312
  source 1..80: mol_type = other DNA

SEQ ID NO: 83082 - DNA, 80 bp, synthetic construct; identical to SEQ ID NO: 49832
  source 1..80: mol_type = other DNA

SEQ ID NO: 83083 - DNA, 80 bp, synthetic construct; identical to SEQ ID NO: 49833
  source 1..80: mol_type = other DNA

SEQ ID NO: 83084 - DNA, 80 bp, synthetic construct; identical to SEQ ID NO: 16313
  source 1..80: mol_type = other DNA

SEQ ID NO: 83085 - DNA, 80 bp, synthetic construct; identical to SEQ ID NO: 49835
  source 1..80: mol_type = other DNA

SEQ ID NO: 83086 - DNA, 80 bp, synthetic construct; identical to SEQ ID NO: 49836
  source 1..80: mol_type = other DNA

SEQ ID NO: 83087 - DNA, 80 bp, synthetic construct; identical to SEQ ID NO: 49837
  source 1..80: mol_type = other DNA

SEQ ID NO: 83088 - DNA, 80 bp, synthetic construct; identical to SEQ ID NO: 49838
  source 1..80: mol_type = other DNA

SEQ ID NO: 83089 - DNA, 80 bp, synthetic construct; identical to SEQ ID NO: 16314
  source 1..80: mol_type = other DNA

SEQ ID NO: 83090 - DNA, 80 bp, synthetic construct; identical to SEQ ID NO: 49840
  source 1..80: mol_type = other DNA

SEQ ID NO: 83091 - DNA, 80 bp, synthetic construct; identical to SEQ ID NO: 49841
  source 1..80: mol_type = other DNA

SEQ ID NO: 83092 - DNA, 80 bp, synthetic construct; identical to SEQ ID NO: 49842
  source 1..80: mol_type = other DNA

SEQ ID NO: 83093 - DNA, 80 bp, synthetic construct; identical to SEQ ID NO: 16315
  source 1..80: mol_type = other DNA

SEQ ID NO: 83094 - DNA, 80 bp, synthetic construct; identical to SEQ ID NO: 49844
  source 1..80: mol_type = other DNA

SEQ ID NO: 83095 - DNA, 80 bp, synthetic construct; identical to SEQ ID NO: 49845
  source 1..80: mol_type = other DNA

SEQ ID NO: 83096 - DNA, 80 bp, synthetic construct; identical to SEQ ID NO: 49846
  source 1..80: mol_type = other DNA

SEQ ID NO: 83097 - DNA, 80 bp, synthetic construct; identical to SEQ ID NO: 16316
  source 1..80: mol_type = other DNA

SEQ ID NO: 83098 - DNA, 80 bp, synthetic construct; identical to SEQ ID NO: 49848
  source 1..80: mol_type = other DNA

SEQ ID NO: 83099 - DNA, 80 bp, synthetic construct; identical to SEQ ID NO: 49849
  source 1..80: mol_type = other DNA

SEQ ID NO: 83100 - DNA, 80 bp, synthetic construct; identical to SEQ ID NO: 16317
  source 1..80: mol_type = other DNA

SEQ ID NO: 83101 - DNA, 80 bp, synthetic construct; identical to SEQ ID NO: 49851
  source 1..80: mol_type = other DNA

SEQ ID NO: 83102 - DNA, 80 bp, synthetic construct; identical to SEQ ID NO: 49852
  source 1..80: mol_type = other DNA

SEQ ID NO: 83103 - DNA, 80 bp, synthetic construct; identical to SEQ ID NO: 49853
  source 1..80: mol_type = other DNA

SEQ ID NO: 83104 - DNA, 80 bp, synthetic construct; identical to SEQ ID NO: 16318
  source 1..80: mol_type = other DNA

SEQ ID NO: 83105 - DNA, 80 bp, synthetic construct; identical to SEQ ID NO: 49856
  source 1..80: mol_type = other DNA

SEQ ID NO: 83106 - DNA, 80 bp, synthetic construct; identical to SEQ ID NO: 49857
  source 1..80: mol_type = other DNA

SEQ ID NO: 83107 - DNA, 80 bp, synthetic construct; identical to SEQ ID NO: 16319
  source 1..80: mol_type = other DNA

SEQ ID NO: 83108 - DNA, 80 bp, synthetic construct; identical to SEQ ID NO: 49859
  source 1..80: mol_type = other DNA

SEQ ID NO: 83109 - DNA, 80 bp, synthetic construct; identical to SEQ ID NO: 49860
  source 1..80: mol_type = other DNA

SEQ ID NO: 83110 - DNA, 80 bp, synthetic construct; identical to SEQ ID NO: 49861
  source 1..80: mol_type = other DNA

SEQ ID NO: 83111 - DNA, 80 bp, synthetic construct; identical to SEQ ID NO: 49862
  source 1..80: mol_type = other DNA

SEQ ID NO: 83112 - DNA, 80 bp, synthetic construct; identical to SEQ ID NO: 16320
  source 1..80: mol_type = other DNA

SEQ ID NO: 83113 - DNA, 80 bp, synthetic construct; identical to SEQ ID NO: 49864
  source 1..80: mol_type = other DNA

SEQ ID NO: 83114 - DNA, 80 bp, synthetic construct; identical to SEQ ID NO: 49865
  source 1..80: mol_type = other DNA

SEQ ID NO: 83115 - DNA, 80 bp, synthetic construct; identical to SEQ ID NO: 16321
  source 1..80: mol_type = other DNA

SEQ ID NO: 83116 - DNA, 80 bp, synthetic construct; identical to SEQ ID NO: 49867
  source 1..80: mol_type = other DNA

SEQ ID NO: 83117 - DNA, 80 bp, synthetic construct; identical to SEQ ID NO: 49868
  source 1..80: mol_type = other DNA

SEQ ID NO: 83118 - DNA, 80 bp, synthetic construct; identical to SEQ ID NO: 49869
  source 1..80: mol_type = other DNA

SEQ ID NO: 83119 - DNA, 80 bp, synthetic construct; identical to SEQ ID NO: 16322
  source 1..80: mol_type = other DNA

SEQ ID NO: 83120 - DNA, 80 bp, synthetic construct; identical to SEQ ID NO: 49871
  source 1..80: mol_type = other DNA

SEQ ID NO: 83121 - DNA, 80 bp, synthetic construct; identical to SEQ ID NO: 49872
  source 1..80: mol_type = other DNA

SEQ ID NO: 83122 - DNA, 80 bp, synthetic construct; identical to SEQ ID NO: 16323
  source 1..80: mol_type = other DNA

SEQ ID NO: 83123 - DNA, 80 bp, synthetic construct; identical to SEQ ID NO: 49875
  source 1..80: mol_type = other DNA

SEQ ID NO: 83124 - DNA, 80 bp, synthetic construct; identical to SEQ ID NO: 49876
  source 1..80: mol_type = other DNA

SEQ ID NO: 83125 - DNA, 80 bp, synthetic construct; identical to SEQ ID NO: 49877
  source 1..80: mol_type = other DNA

SEQ ID NO: 83126 - DNA, 80 bp, synthetic construct; identical to SEQ ID NO: 16324
  source 1..80: mol_type = other DNA

SEQ ID NO: 83127 - DNA, 80 bp, synthetic construct; identical to SEQ ID NO: 49879
  source 1..80: mol_type = other DNA

SEQ ID NO: 83128 - DNA, 80 bp, synthetic construct; identical to SEQ ID NO: 49880
  source 1..80: mol_type = other DNA

SEQ ID NO: 83129 - DNA, 80 bp, synthetic construct; identical to SEQ ID NO: 49881
  source 1..80: mol_type = other DNA

SEQ ID NO: 83130 - DNA, 80 bp, synthetic construct; identical to SEQ ID NO: 16325
  source 1..80: mol_type = other DNA

SEQ ID NO: 83131 - DNA, 80 bp, synthetic construct; identical to SEQ ID NO: 49883
  source 1..80: mol_type = other DNA

SEQ ID NO: 83132 - DNA, 80 bp, synthetic construct; identical to SEQ ID NO: 49884
  source 1..80: mol_type = other DNA

SEQ ID NO: 83133 - DNA, 80 bp, synthetic construct; identical to SEQ ID NO: 49885
  source 1..80: mol_type = other DNA

SEQ ID NO: 83134 - DNA, 80 bp, synthetic construct; identical to SEQ ID NO: 16326
  source 1..80: mol_type = other DNA

SEQ ID NO: 83135 - DNA, 80 bp, synthetic construct; identical to SEQ ID NO: 49887
  source 1..80: mol_type = other DNA

SEQ ID NO: 83136 - DNA, 80 bp, synthetic construct; identical to SEQ ID NO: 49888
  source 1..80: mol_type = other DNA

SEQ ID NO: 83137 - DNA, 80 bp, synthetic construct; identical to SEQ ID NO: 49889
  source 1..80: mol_type = other DNA

SEQ ID NO: 83138 - DNA, 80 bp, synthetic construct; identical to SEQ ID NO: 16327
  source 1..80: mol_type = other DNA

SEQ ID NO: 83139 - DNA, 80 bp, synthetic construct; identical to SEQ ID NO: 49891
  source 1..80: mol_type = other DNA

SEQ ID NO: 83140 - DNA, 80 bp, synthetic construct; identical to SEQ ID NO: 49892
  source 1..80: mol_type = other DNA

SEQ ID NO: 83141 - DNA, 80 bp, synthetic construct; identical to SEQ ID NO: 49893
  source 1..80: mol_type = other DNA

SEQ ID NO: 83142 - DNA, 80 bp, synthetic construct; identical to SEQ ID NO: 49894
  source 1..80: mol_type = other DNA

SEQ ID NO: 83143 - DNA, 80 bp, synthetic construct; identical to SEQ ID NO: 16328
  source 1..80: mol_type = other DNA

SEQ ID NO: 83144 - DNA, 80 bp, synthetic construct; identical to SEQ ID NO: 49896
  source 1..80: mol_type = other DNA

SEQ ID NO: 83145 - DNA, 80 bp, synthetic construct; identical to SEQ ID NO: 49897
  source 1..80: mol_type = other DNA

SEQ ID NO: 83146 - DNA, 80 bp, synthetic construct; identical to SEQ ID NO: 49898
  source 1..80: mol_type = other DNA

SEQ ID NO: 83147 - DNA, 80 bp, synthetic construct; identical to SEQ ID NO: 49899
  source 1..80: mol_type = other DNA

SEQ ID NO: 83148 - DNA, 80 bp, synthetic construct; identical to SEQ ID NO: 49901
  source 1..80: mol_type = other DNA

SEQ ID NO: 83149 - DNA, 80 bp, synthetic construct; identical to SEQ ID NO: 49902
  source 1..80: mol_type = other DNA

SEQ ID NO: 83150 - DNA, 80 bp, synthetic construct; identical to SEQ ID NO: 49903
  source 1..80: mol_type = other DNA

SEQ ID NO: 83151 - DNA, 80 bp, synthetic construct; identical to SEQ ID NO: 49904
  source 1..80: mol_type = other DNA

SEQ ID NO: 83152 - DNA, 80 bp, synthetic construct; identical to SEQ ID NO: 16330
  source 1..80: mol_type = other DNA

SEQ ID NO: 83153 - DNA, 80 bp, synthetic construct; identical to SEQ ID NO: 49906
  source 1..80: mol_type = other DNA

SEQ ID NO: 83154 - DNA, 80 bp, synthetic construct; identical to SEQ ID NO: 16331
  source 1..80: mol_type = other DNA

SEQ ID NO: 83155 - DNA, 80 bp, synthetic construct; identical to SEQ ID NO: 49908
  source 1..80: mol_type = other DNA

SEQ ID NO: 83156 - DNA, 80 bp, synthetic construct; identical to SEQ ID NO: 49910
  source 1..80: mol_type = other DNA

SEQ ID NO: 83157 - DNA, 80 bp, synthetic construct; identical to SEQ ID NO: 16332
  source 1..80: mol_type = other DNA

SEQ ID NO: 83158 - DNA, 80 bp, synthetic construct; identical to SEQ ID NO: 49912
  source 1..80: mol_type = other DNA

SEQ ID NO: 83159 - DNA, 80 bp, synthetic construct; identical to SEQ ID NO: 49913
  source 1..80: mol_type = other DNA

SEQ ID NO: 83160 - DNA, 80 bp, synthetic construct; identical to SEQ ID NO: 49914
  source 1..80: mol_type = other DNA

SEQ ID NO: 83161 - DNA, 80 bp, synthetic construct; identical to SEQ ID NO: 16333
  source 1..80: mol_type = other DNA

SEQ ID NO: 83162 - DNA, 80 bp, synthetic construct; identical to SEQ ID NO: 49916
  source 1..80: mol_type = other DNA

SEQ ID NO: 83163 - DNA, 80 bp, synthetic construct; identical to SEQ ID NO: 49917
  source 1..80: mol_type = other DNA

SEQ ID NO: 83164 - DNA, 80 bp, synthetic construct; identical to SEQ ID NO: 49918
  source 1..80: mol_type = other DNA

SEQ ID NO: 83165 - DNA, 80 bp, synthetic construct; identical to SEQ ID NO: 49919
  source 1..80: mol_type = other DNA

SEQ ID NO: 83166 - DNA, 80 bp, synthetic construct; identical to SEQ ID NO: 16334
  source 1..80: mol_type = other DNA

SEQ ID NO: 83167 - DNA, 80 bp, synthetic construct; identical to SEQ ID NO: 49921
  source 1..80: mol_type = other DNA

SEQ ID NO: 83168 - DNA, 80 bp, synthetic construct; identical to SEQ ID NO: 49922
  source 1..80: mol_type = other DNA

SEQ ID NO: 83169 - DNA, 80 bp, synthetic construct; identical to SEQ ID NO: 16335
  source 1..80: mol_type = other DNA

SEQ ID NO: 83170 - DNA, 80 bp, synthetic construct; identical to SEQ ID NO: 49924
  source 1..80: mol_type = other DNA

SEQ ID NO: 83171 - DNA, 80 bp, synthetic construct; identical to SEQ ID NO: 49925
  source 1..80: mol_type = other DNA

SEQ ID NO: 83172 - DNA, 80 bp, synthetic construct; identical to SEQ ID NO: 49926
  source 1..80: mol_type = other DNA

SEQ ID NO: 83173 - DNA, 80 bp, synthetic construct; identical to SEQ ID NO: 49927
  source 1..80: mol_type = other DNA

SEQ ID NO: 83174 - DNA, 80 bp, synthetic construct; identical to SEQ ID NO: 16336
  source 1..80: mol_type = other DNA

SEQ ID NO: 83175 - DNA, 80 bp, synthetic construct; identical to SEQ ID NO: 49929
  source 1..80: mol_type = other DNA

SEQ ID NO: 83176 - DNA, 80 bp, synthetic construct; identical to SEQ ID NO: 49930
  source 1..80: mol_type = other DNA

SEQ ID NO: 83177 - DNA, 80 bp, synthetic construct; identical to SEQ ID NO: 49931
  source 1..80: mol_type = other DNA

SEQ ID NO: 83178 - DNA, 80 bp, synthetic construct; identical to SEQ ID NO: 16337
  source 1..80: mol_type = other DNA

SEQ ID NO: 83179 - DNA, 80 bp, synthetic construct; identical to SEQ ID NO: 49933
  source 1..80: mol_type = other DNA

SEQ ID NO: 83180 - DNA, 80 bp, synthetic construct; identical to SEQ ID NO: 49934
  source 1..80: mol_type = other DNA

SEQ ID NO: 83181 - DNA, 80 bp, synthetic construct; identical to SEQ ID NO: 49935
  source 1..80: mol_type = other DNA

SEQ ID NO: 83182 - DNA, 80 bp, synthetic construct; identical to SEQ ID NO: 16338
  source 1..80: mol_type = other DNA

SEQ ID NO: 83183 - DNA, 80 bp, synthetic construct; identical to SEQ ID NO: 49937
  source 1..80: mol_type = other DNA

SEQ ID NO: 83184 - DNA, 80 bp, synthetic construct; identical to SEQ ID NO: 49938
  source 1..80: mol_type = other DNA

SEQ ID NO: 83185 - DNA, 80 bp, synthetic construct; identical to SEQ ID NO: 16339
  source 1..80: mol_type = other DNA

SEQ ID NO: 83186 - DNA, 80 bp, synthetic construct; identical to SEQ ID NO: 14707
  source 1..80: mol_type = other DNA

SEQ ID NO: 83187 - DNA, 80 bp, synthetic construct; identical to SEQ ID NO: 16340
  source 1..80: mol_type = other DNA

SEQ ID NO: 83188 - DNA, 80 bp, synthetic construct; identical to SEQ ID NO: 49945
  source 1..80: mol_type = other DNA

SEQ ID NO: 83189 - DNA, 80 bp, synthetic construct; identical to SEQ ID NO: 16341
  source 1..80: mol_type = other DNA

SEQ ID NO: 83190 - DNA, 80 bp, synthetic construct; identical to SEQ ID NO: 49949
  source 1..80: mol_type = other DNA

SEQ ID NO: 83191 - DNA, 80 bp, synthetic construct; identical to SEQ ID NO: 49950
  source 1..80: mol_type = other DNA

SEQ ID NO: 83192 - DNA, 80 bp, synthetic construct; identical to SEQ ID NO: 16342
  source 1..80: mol_type = other DNA

SEQ ID NO: 83193 - DNA, 80 bp, synthetic construct; identical to SEQ ID NO: 49953
  source 1..80: mol_type = other DNA

SEQ ID NO: 83194 - DNA, 80 bp, synthetic construct; identical to SEQ ID NO: 49955
  source 1..80: mol_type = other DNA

SEQ ID NO: 83195 - DNA, 80 bp, synthetic construct; identical to SEQ ID NO: 49957
  source 1..80: mol_type = other DNA

SEQ ID NO: 83196 - DNA, 80 bp, synthetic construct; identical to SEQ ID NO: 49959
  source 1..80: mol_type = other DNA

SEQ ID NO: 83197 - DNA, 80 bp, synthetic construct; identical to SEQ ID NO: 49961
  source 1..80: mol_type = other DNA

SEQ ID NO: 83198 - DNA, 80 bp, synthetic construct; identical to SEQ ID NO: 49963
  source 1..80: mol_type = other DNA

SEQ ID NO: 83199 - DNA, 80 bp, synthetic construct; identical to SEQ ID NO: 16345
  source 1..80: mol_type = other DNA

SEQ ID NO: 83200 - DNA, 80 bp, synthetic construct; identical to SEQ ID NO: 49965
  source 1..80: mol_type = other DNA

SEQ ID NO: 83201 - DNA, 80 bp, synthetic construct; identical to SEQ ID NO: 49966
  source 1..80: mol_type = other DNA

SEQ ID NO: 83202 - DNA, 80 bp, synthetic construct; identical to SEQ ID NO: 49967
  source 1..80: mol_type = other DNA

SEQ ID NO: 83203 - DNA, 80 bp, synthetic construct; identical to SEQ ID NO: 16346
  source 1..80: mol_type = other DNA

SEQ ID NO: 83204 - DNA, 80 bp, synthetic construct; identical to SEQ ID NO: 49969
  source 1..80: mol_type = other DNA

SEQ ID NO: 83205 - DNA, 80 bp, synthetic construct; identical to SEQ ID NO: 49970
  source 1..80: mol_type = other DNA

SEQ ID NO: 83206 - DNA, 80 bp, synthetic construct; identical to SEQ ID NO: 16347
  source 1..80: mol_type = other DNA

SEQ ID NO: 83207 - DNA, 80 bp, synthetic construct; identical to SEQ ID NO: 49972
  source 1..80: mol_type = other DNA

SEQ ID NO: 83208 - DNA, 80 bp, synthetic construct; identical to SEQ ID NO: 49973
  source 1..80: mol_type = other DNA

SEQ ID NO: 83209 - DNA, 80 bp, synthetic construct; identical to SEQ ID NO: 49974
  source 1..80: mol_type = other DNA

SEQ ID NO: 83210 - DNA, 80 bp, synthetic construct; identical to SEQ ID NO: 16348
  source 1..80: mol_type = other DNA

SEQ ID NO: 83211 - DNA, 80 bp, synthetic construct; identical to SEQ ID NO: 49976
  source 1..80: mol_type = other DNA

SEQ ID NO: 83212 - DNA, 80 bp, synthetic construct; identical to SEQ ID NO: 49977
  source 1..80: mol_type = other DNA

SEQ ID NO: 83213 - DNA, 80 bp, synthetic construct; identical to SEQ ID NO: 49978
  source 1..80: mol_type = other DNA

SEQ ID NO: 83214 - DNA, 80 bp, synthetic construct; identical to SEQ ID NO: 49979
  source 1..80: mol_type = other DNA

SEQ ID NO: 83215 - DNA, 80 bp, synthetic construct; identical to SEQ ID NO: 16349
  source 1..80: mol_type = other DNA

SEQ ID NO: 83216 - DNA, 80 bp, synthetic construct; identical to SEQ ID NO: 49981
  source 1..80: mol_type = other DNA

SEQ ID NO: 83217 - DNA, 80 bp, synthetic construct; identical to SEQ ID NO: 49982
  source 1..80: mol_type = other DNA

SEQ ID NO: 83218 - DNA, 80 bp, synthetic construct; identical to SEQ ID NO: 16350
  source 1..80: mol_type = other DNA

SEQ ID NO: 83219 - DNA, 80 bp, synthetic construct; identical to SEQ ID NO: 49984
  source 1..80: mol_type = other DNA

SEQ ID NO: 83220 - DNA, 80 bp, synthetic construct; identical to SEQ ID NO: 49985
  source 1..80: mol_type = other DNA

SEQ ID NO: 83221 - DNA, 80 bp, synthetic construct; identical to SEQ ID NO: 49986
  source 1..80: mol_type = other DNA

SEQ ID NO: 83222 - DNA, 80 bp, synthetic construct; identical to SEQ ID NO: 49987
  source 1..80: mol_type = other DNA

SEQ ID NO: 83223 - DNA, 80 bp, synthetic construct; identical to SEQ ID NO: 16351
  source 1..80: mol_type = other DNA

SEQ ID NO: 83224 - DNA, 80 bp, synthetic construct; identical to SEQ ID NO: 49989
  source 1..80: mol_type = other DNA

SEQ ID NO: 83225 - DNA, 80 bp, synthetic construct; identical to SEQ ID NO: 49990
  source 1..80: mol_type = other DNA

SEQ ID NO: 83226 - DNA, 80 bp, synthetic construct; identical to SEQ ID NO: 49991
  source 1..80: mol_type = other DNA

SEQ ID NO: 83227 - DNA, 80 bp, synthetic construct; identical to SEQ ID NO: 16352
  source 1..80: mol_type = other DNA

SEQ ID NO: 83228 - DNA, 80 bp, synthetic construct; identical to SEQ ID NO: 49993
  source 1..80: mol_type = other DNA

SEQ ID NO: 83229 - DNA, 80 bp, synthetic construct; identical to SEQ ID NO: 49994
  source 1..80: mol_type = other DNA

SEQ ID NO: 83230 - DNA, 80 bp, synthetic construct; identical to SEQ ID NO: 16353
  source 1..80: mol_type = other DNA

SEQ ID NO: 83231 - DNA, 80 bp, synthetic construct; identical to SEQ ID NO: 49996
  source 1..80: mol_type = other DNA

SEQ ID NO: 83232 - DNA, 80 bp, synthetic construct; identical to SEQ ID NO: 49997
  source 1..80: mol_type = other DNA

SEQ ID NO: 83233 - DNA, 80 bp, synthetic construct; identical to SEQ ID NO: 49998
  source 1..80: mol_type = other DNA

SEQ ID NO: 83234 - DNA, 80 bp, synthetic construct; identical to SEQ ID NO: 16354
  source 1..80: mol_type = other DNA

SEQ ID NO: 83235 - DNA, 80 bp, synthetic construct; identical to SEQ ID NO: 50000
  source 1..80: mol_type = other DNA

SEQ ID NO: 83236 - DNA, 80 bp, synthetic construct; identical to SEQ ID NO: 50001
  source 1..80: mol_type = other DNA

SEQ ID NO: 83237 - DNA, 80 bp, synthetic construct; identical to SEQ ID NO: 50002
  source 1..80: mol_type = other DNA

SEQ ID NO: 83238 - DNA, 80 bp, synthetic construct; identical to SEQ ID NO: 16355
  source 1..80: mol_type = other DNA

SEQ ID NO: 83239 - DNA, 80 bp, synthetic construct; identical to SEQ ID NO: 50004
  source 1..80: mol_type = other DNA

SEQ ID NO: 83240 - DNA, 80 bp, synthetic construct; identical to SEQ ID NO: 50005
  source 1..80: mol_type = other DNA

SEQ ID NO: 83241 - DNA, 80 bp, synthetic construct; identical to SEQ ID NO: 50006
  source 1..80: mol_type = other DNA

SEQ ID NO: 83242 - DNA, 80 bp, synthetic construct; identical to SEQ ID NO: 16356
  source 1..80: mol_type = other DNA

SEQ ID NO: 83243 - DNA, 80 bp, synthetic construct; identical to SEQ ID NO: 50008
  source 1..80: mol_type = other DNA

SEQ ID NO: 83244 - DNA, 80 bp, synthetic construct; identical to SEQ ID NO: 50009
  source 1..80: mol_type = other DNA

SEQ ID NO: 83245 - DNA, 80 bp, synthetic construct; identical to SEQ ID NO: 16357
  source 1..80: mol_type = other DNA

SEQ ID NO: 83246 - DNA, 80 bp, synthetic construct; identical to SEQ ID NO: 50011
  source 1..80: mol_type = other DNA

SEQ ID NO: 83247 - DNA, 80 bp, synthetic construct; identical to SEQ ID NO: 50012
  source 1..80: mol_type = other DNA

SEQ ID NO: 83248 - DNA, 80 bp, synthetic construct; identical to SEQ ID NO: 50013
  source 1..80: mol_type = other DNA

SEQ ID NO: 83249 - DNA, 80 bp, synthetic construct; identical to SEQ ID NO: 50014
  source 1..80: mol_type = other DNA

SEQ ID NO: 83250 - DNA, 80 bp, synthetic construct; identical to SEQ ID NO: 16358
  source 1..80: mol_type = other DNA

SEQ ID NO: 83251 - DNA, 80 bp, synthetic construct; identical to SEQ ID NO: 50016
  source 1..80: mol_type = other DNA

SEQ ID NO: 83252 - DNA, 80 bp, synthetic construct; identical to SEQ ID NO: 50017
  source 1..80: mol_type = other DNA

SEQ ID NO: 83253 - DNA, 80 bp, synthetic construct; identical to SEQ ID NO: 50018
  source 1..80: mol_type = other DNA

SEQ ID NO: 83254 - DNA, 80 bp, synthetic construct; identical to SEQ ID NO: 16359
  source 1..80: mol_type = other DNA

SEQ ID NO: 83255 - DNA, 80 bp, synthetic construct; identical to SEQ ID NO: 50020
  source 1..80: mol_type = other DNA

SEQ ID NO: 83256 - DNA, 80 bp, synthetic construct; identical to SEQ ID NO: 50021
  source 1..80: mol_type = other DNA

SEQ ID NO: 83257 - DNA, 80 bp, synthetic construct; identical to SEQ ID NO: 50022
  source 1..80: mol_type = other DNA

SEQ ID NO: 83258 - DNA, 80 bp, synthetic construct; identical to SEQ ID NO: 16360
  source 1..80: mol_type = other DNA

SEQ ID NO: 83259 - DNA, 80 bp, synthetic construct; identical to SEQ ID NO: 50024
  source 1..80: mol_type = other DNA

SEQ ID NO: 83260 - DNA, 80 bp, synthetic construct; identical to SEQ ID NO: 50025
  source 1..80: mol_type = other DNA

SEQ ID NO: 83261 - DNA, 80 bp, synthetic construct; identical to SEQ ID NO: 50026
  source 1..80: mol_type = other DNA

SEQ ID NO: 83262 - DNA, 80 bp, synthetic construct; identical to SEQ ID NO: 16361
  source 1..80: mol_type = other DNA

SEQ ID NO: 83263 - DNA, 80 bp, synthetic construct; identical to SEQ ID NO: 50028
  source 1..80: mol_type = other DNA

SEQ ID NO: 83264 - DNA, 80 bp, synthetic construct; identical to SEQ ID NO: 50029
  source 1..80: mol_type = other DNA

SEQ ID NO: 83265 - DNA, 80 bp, synthetic construct; identical to SEQ ID NO: 16362
  source 1..80: mol_type = other DNA

SEQ ID NO: 83266 - DNA, 80 bp, synthetic construct; identical to SEQ ID NO: 50032
  source 1..80: mol_type = other DNA

SEQ ID NO: 83267 - DNA, 80 bp, synthetic construct; identical to SEQ ID NO: 50033
  source 1..80: mol_type = other DNA

SEQ ID NO: 83268 - DNA, 80 bp, synthetic construct; identical to SEQ ID NO: 16363
  source 1..80: mol_type = other DNA

SEQ ID NO: 83269 - DNA, 80 bp, synthetic construct; identical to SEQ ID NO: 50036
  source 1..80: mol_type = other DNA

SEQ ID NO: 83270 - DNA, 80 bp, synthetic construct; identical to SEQ ID NO: 50037
  source 1..80: mol_type = other DNA

SEQ ID NO: 83271 - DNA, 80 bp, synthetic construct; identical to SEQ ID NO: 50038
  source 1..80: mol_type = other DNA

SEQ ID NO: 83272 - DNA, 80 bp, synthetic construct; identical to SEQ ID NO: 50039
  source 1..80: mol_type = other DNA

SEQ ID NO: 83273 - DNA, 80 bp, synthetic construct; identical to SEQ ID NO: 16364
  source 1..80: mol_type = other DNA

SEQ ID NO: 83274 - DNA, 80 bp, synthetic construct; identical to SEQ ID NO: 50041
  source 1..80: mol_type = other DNA

SEQ ID NO: 83275 - DNA, 80 bp, synthetic construct; identical to SEQ ID NO: 50042
  source 1..80: mol_type = other DNA

SEQ ID NO: 83276 - DNA, 80 bp, synthetic construct; identical to SEQ ID NO: 16365
  source 1..80: mol_type = other DNA

SEQ ID NO: 83277 - DNA, 80 bp, synthetic construct; identical to SEQ ID NO: 50044
  source 1..80: mol_type = other DNA

SEQ ID NO: 83278 - DNA, 80 bp, synthetic construct; identical to SEQ ID NO: 50045
  source 1..80: mol_type = other DNA

SEQ ID NO: 83279 - DNA, 80 bp, synthetic construct; identical to SEQ ID NO: 50046
  source 1..80: mol_type = other DNA

SEQ ID NO: 83280 - DNA, 80 bp, synthetic construct; identical to SEQ ID NO: 16366
  source 1..80: mol_type = other DNA

SEQ ID NO: 83281 - DNA, 80 bp, synthetic construct; identical to SEQ ID NO: 50048
  source 1..80: mol_type = other DNA

SEQ ID NO: 83282 - DNA, 80 bp, synthetic construct; identical to SEQ ID NO: 50049
  source 1..80: mol_type = other DNA

SEQ ID NO: 83283 - DNA, 80 bp, synthetic construct; identical to SEQ ID NO: 50050
  source 1..80: mol_type = other DNA

SEQ ID NO: 83284 - DNA, 80 bp, synthetic construct; identical to SEQ ID NO: 16367
  source 1..80: mol_type = other DNA

SEQ ID NO: 83285 - DNA, 80 bp, synthetic construct; identical to SEQ ID NO: 50052
  source 1..80: mol_type = other DNA

SEQ ID NO: 83286 - DNA, 80 bp, synthetic construct; identical to SEQ ID NO: 50053
  source 1..80: mol_type = other DNA

SEQ ID NO: 83287 - DNA, 80 bp, synthetic construct; identical to SEQ ID NO: 50054
  source 1..80: mol_type = other DNA

SEQ ID NO: 83288 - DNA, 80 bp, synthetic construct; identical to SEQ ID NO: 16368
  source 1..80: mol_type = other DNA

SEQ ID NO: 83289 - DNA, 80 bp, synthetic construct; identical to SEQ ID NO: 50056
  source 1..80: mol_type = other DNA

SEQ ID NO: 83290 - DNA, 80 bp, synthetic construct; identical to SEQ ID NO: 50057
  source 1..80: mol_type = other DNA

SEQ ID NO: 83291 - DNA, 80 bp, synthetic construct; identical to SEQ ID NO: 50058
  source 1..80: mol_type = other DNA

SEQ ID NO: 83292 - DNA, 80 bp, synthetic construct; identical to SEQ ID NO: 50059
  source 1..80: mol_type = other DNA

SEQ ID NO: 83293 - DNA, 80 bp, synthetic construct; identical to SEQ ID NO: 16369
  source 1..80: mol_type = other DNA

SEQ ID NO: 83294 - DNA, 80 bp, synthetic construct; identical to SEQ ID NO: 50061
  source 1..80: mol_type = other DNA

SEQ ID NO: 83295 - DNA, 80 bp, synthetic construct; identical to SEQ ID NO: 50062
  source 1..80: mol_type = other DNA

SEQ ID NO: 83296 - DNA, 80 bp, synthetic construct; identical to SEQ ID NO: 16370
  source 1..80: mol_type = other DNA

SEQ ID NO: 83297 - DNA, 80 bp, synthetic construct; identical to SEQ ID NO: 50065
  source 1..80: mol_type = other DNA

SEQ ID NO: 83298 - DNA, 80 bp, synthetic construct; identical to SEQ ID NO: 50066
  source 1..80: mol_type = other DNA

SEQ ID NO: 83299 - DNA, 80 bp, synthetic construct; identical to SEQ ID NO: 16371
  source 1..80: mol_type = other DNA

SEQ ID NO: 83300 - DNA, 80 bp, synthetic construct; identical to SEQ ID NO: 50068
  source 1..80: mol_type = other DNA

SEQ ID NO: 83301 - DNA, 80 bp, synthetic construct; identical to SEQ ID NO: 50069
  source 1..80: mol_type = other DNA

SEQ ID NO: 83302 - DNA, 80 bp, synthetic construct; identical to SEQ ID NO: 50070
  source 1..80: mol_type = other DNA

SEQ ID NO: 83303 - DNA, 80 bp, synthetic construct; identical to SEQ ID NO: 50071
  source 1..80: mol_type = other DNA

SEQ ID NO: 83304 - DNA, 80 bp, synthetic construct; identical to SEQ ID NO: 50072
  source 1..80: mol_type = other DNA

SEQ ID NO: 83305 - DNA, 80 bp, synthetic construct; identical to SEQ ID NO: 50073
  source 1..80: mol_type = other DNA

SEQ ID NO: 83306 - DNA, 80 bp, synthetic construct; identical to SEQ ID NO: 16372
  source 1..80: mol_type = other DNA

SEQ ID NO: 83307 - DNA, 80 bp, synthetic construct; identical to SEQ ID NO: 50075
  source 1..80: mol_type = other DNA

SEQ ID NO: 83308 - DNA, 80 bp, synthetic construct; identical to SEQ ID NO: 50077
  source 1..80: mol_type = other DNA

SEQ ID NO: 83309 - DNA, 80 bp, synthetic construct; identical to SEQ ID NO: 16373
  source 1..80: mol_type = other DNA

SEQ ID NO: 83310 - DNA, 80 bp, synthetic construct; identical to SEQ ID NO: 50079
  source 1..80: mol_type = other DNA

SEQ ID NO: 83311 - DNA, 80 bp, synthetic construct; identical to SEQ ID NO: 50080
  source 1..80: mol_type = other DNA

SEQ ID NO: 83312 - DNA, 80 bp, synthetic construct; identical to SEQ ID NO: 16374
  source 1..80: mol_type = other DNA

SEQ ID NO: 83313 - DNA, 80 bp, synthetic construct; identical to SEQ ID NO: 50083
  source 1..80: mol_type = other DNA

SEQ ID NO: 83314 - DNA, 80 bp, synthetic construct; identical to SEQ ID NO: 50084
  source 1..80: mol_type = other DNA

SEQ ID NO: 83315 - DNA, 80 bp, synthetic construct; identical to SEQ ID NO: 50085
  source 1..80: mol_type = other DNA

SEQ ID NO: 83316 - DNA, 80 bp, synthetic construct; identical to SEQ ID NO: 16375
  source 1..80: mol_type = other DNA

SEQ ID NO: 83317 - DNA, 80 bp, synthetic construct; identical to SEQ ID NO: 50087
  source 1..80: mol_type = other DNA

SEQ ID NO: 83318 - DNA, 80 bp, synthetic construct; identical to SEQ ID NO: 50088
  source 1..80: mol_type = other DNA

SEQ ID NO: 83319 - DNA, 80 bp, synthetic construct; identical to SEQ ID NO: 16376
  source 1..80: mol_type = other DNA

SEQ ID NO: 83320 - DNA, 80 bp, synthetic construct; identical to SEQ ID NO: 50090
  source 1..80: mol_type = other DNA

SEQ ID NO: 83321 - DNA, 80 bp, synthetic construct; identical to SEQ ID NO: 50091
  source 1..80: mol_type = other DNA

SEQ ID NO: 83322 - DNA, 80 bp, synthetic construct; identical to SEQ ID NO: 50093
  source 1..80: mol_type = other DNA

SEQ ID NO: 83323 - DNA, 80 bp, synthetic construct; identical to SEQ ID NO: 16377
  source 1..80: mol_type = other DNA

SEQ ID NO: 83324 - DNA, 80 bp, synthetic construct; identical to SEQ ID NO: 50095
  source 1..80: mol_type = other DNA

SEQ ID NO: 83325 - DNA, 80 bp, synthetic construct; identical to SEQ ID NO: 50096
  source 1..80: mol_type = other DNA

SEQ ID NO: 83326 - DNA, 80 bp, synthetic construct; identical to SEQ ID NO: 16378
  source 1..80: mol_type = other DNA

SEQ ID NO: 83327 - DNA, 80 bp, synthetic construct; identical to SEQ ID NO: 50098
  source 1..80: mol_type = other DNA

SEQ ID NO: 83328 - DNA, 80 bp, synthetic construct; identical to SEQ ID NO: 50099
  source 1..80: mol_type = other DNA

SEQ ID NO: 83329 - DNA, 80 bp, synthetic construct; identical to SEQ ID NO: 50100
  source 1..80: mol_type = other DNA

SEQ ID NO: 83330 - DNA, 80 bp, synthetic construct; identical to SEQ ID NO: 16379
  source 1..80: mol_type = other DNA

SEQ ID NO: 83331 - DNA, 80 bp, synthetic construct; identical to SEQ ID NO: 50102
  source 1..80: mol_type = other DNA

SEQ ID NO: 83332 - DNA, 80 bp, synthetic construct; identical to SEQ ID NO: 50103
  source 1..80: mol_type = other DNA

SEQ ID NO: 83333 - DNA, 80 bp, synthetic construct; identical to SEQ ID NO: 50104
  source 1..80: mol_type = other DNA

SEQ ID NO: 83334 - DNA, 80 bp, synthetic construct; identical to SEQ ID NO: 50105
  source 1..80: mol_type = other DNA

SEQ ID NO: 83335 - DNA, 80 bp, synthetic construct; identical to SEQ ID NO: 16380
  source 1..80: mol_type = other DNA

SEQ ID NO: 83336 - DNA, 80 bp, synthetic construct; identical to SEQ ID NO: 50107
  source 1..80: mol_type = other DNA

SEQ ID NO: 83337 - DNA, 80 bp, synthetic construct; identical to SEQ ID NO: 50108
  source 1..80: mol_type = other DNA

SEQ ID NO: 83338 - DNA, 80 bp, synthetic construct; identical to SEQ ID NO: 50109
  source 1..80: mol_type = other DNA

SEQ ID NO: 83339 - DNA, 80 bp, synthetic construct; identical to SEQ ID NO: 16381
  source 1..80: mol_type = other DNA

SEQ ID NO: 83340 - DNA, 80 bp, synthetic construct; identical to SEQ ID NO: 50111
  source 1..80: mol_type = other DNA

SEQ ID NO: 83341 - DNA, 80 bp, synthetic construct; identical to SEQ ID NO: 50112
  source 1..80: mol_type = other DNA

SEQ ID NO: 83342 - DNA, 80 bp, synthetic construct; identical to SEQ ID NO: 16382
  source 1..80: mol_type = other DNA

SEQ ID NO: 83343 - DNA, 80 bp, synthetic construct; identical to SEQ ID NO: 50114
  source 1..80: mol_type = other DNA

SEQ ID NO: 83344 - DNA, 80 bp, synthetic construct; identical to SEQ ID NO: 50115
  source 1..80: mol_type = other DNA

SEQ ID NO: 83345 - DNA, 80 bp, synthetic construct; identical to SEQ ID NO: 50116
  source 1..80: mol_type = other DNA

SEQ ID NO: 83346 - DNA, 80 bp, synthetic construct; identical to SEQ ID NO: 50117
  source 1..80: mol_type = other DNA

SEQ ID NO: 83347 - DNA, 80 bp, synthetic construct; identical to SEQ ID NO: 16383
  source 1..80: mol_type = other DNA

SEQ ID NO: 83348 - DNA, 80 bp, synthetic construct; identical to SEQ ID NO: 50119
  source 1..80: mol_type = other DNA

SEQ ID NO: 83349 - DNA, 80 bp, synthetic construct; identical to SEQ ID NO: 50120
  source 1..80: mol_type = other DNA

SEQ ID NO: 83350 - DNA, 80 bp, synthetic construct; identical to SEQ ID NO: 16384
  source 1..80: mol_type = other DNA

SEQ ID NO: 83351 - DNA, 80 bp, synthetic construct; identical to SEQ ID NO: 50123
  source 1..80: mol_type = other DNA

SEQ ID NO: 83352 - DNA, 80 bp, synthetic construct; identical to SEQ ID NO: 50124
  source 1..80: mol_type = other DNA

SEQ ID NO: 83353 - DNA, 80 bp, synthetic construct; identical to SEQ ID NO: 16385
  source 1..80: mol_type = other DNA

SEQ ID NO: 83354 - DNA, 80 bp, synthetic construct; identical to SEQ ID NO: 50126
  source 1..80: mol_type = other DNA

SEQ ID NO: 83355 - DNA, 80 bp, synthetic construct; identical to SEQ ID NO: 50127
  source 1..80: mol_type = other DNA

SEQ ID NO: 83356 - DNA, 80 bp, synthetic construct; identical to SEQ ID NO: 50128
  source 1..80: mol_type = other DNA

SEQ ID NO: 83357 - DNA, 80 bp, synthetic construct; identical to SEQ ID NO: 16386
  source 1..80: mol_type = other DNA

SEQ ID NO: 83358 - DNA, 80 bp, synthetic construct; identical to SEQ ID NO: 50130
  source 1..80: mol_type = other DNA

SEQ ID NO: 83359 - DNA, 80 bp, synthetic construct; identical to SEQ ID NO: 50131
  source 1..80: mol_type = other DNA

SEQ ID NO: 83360 - DNA, 80 bp, synthetic construct; identical to SEQ ID NO: 50132
  source 1..80: mol_type = other DNA

SEQ ID NO: 83361 - DNA, 80 bp, synthetic construct; identical to SEQ ID NO: 50133
  source 1..80: mol_type = other DNA

SEQ ID NO: 83362 - DNA, 80 bp, synthetic construct; identical to SEQ ID NO: 16387
  source 1..80: mol_type = other DNA

SEQ ID NO: 83363 - DNA, 80 bp, synthetic construct; identical to SEQ ID NO: 50136
  source 1..80: mol_type = other DNA

SEQ ID NO: 83364 - DNA, 80 bp, synthetic construct; identical to SEQ ID NO: 16388
  source 1..80: mol_type = other DNA

SEQ ID NO: 83365 - DNA, 80 bp, synthetic construct; identical to SEQ ID NO: 50139
  source 1..80: mol_type = other DNA

SEQ ID NO: 83366 - DNA, 80 bp, synthetic construct; identical to SEQ ID NO: 50140
  source 1..80: mol_type = other DNA

SEQ ID NO: 83367 - DNA, 80 bp, synthetic construct; identical to SEQ ID NO: 16389
  source 1..80: mol_type = other DNA

SEQ ID NO: 83368 - DNA, 80 bp, synthetic construct; identical to SEQ ID NO: 50143
  source 1..80: mol_type = other DNA

SEQ ID NO: 83369 - DNA, 80 bp, synthetic construct; identical to SEQ ID NO: 50144
  source 1..80: mol_type = other DNA

SEQ ID NO: 83370 - DNA, 80 bp, synthetic construct; identical to SEQ ID NO: 50145
  source 1..80: mol_type = other DNA

SEQ ID NO: 83371 - DNA, 80 bp, synthetic construct; identical to SEQ ID NO: 16390
  source 1..80: mol_type = other DNA

SEQ ID NO: 83372 - DNA, 80 bp, synthetic construct; identical to SEQ ID NO: 50147
  source 1..80: mol_type = other DNA

SEQ ID NO: 83373 - DNA, 80 bp, synthetic construct; identical to SEQ ID NO: 50148
  source 1..80: mol_type = other DNA

SEQ ID NO: 83374 - DNA, 80 bp, synthetic construct; identical to SEQ ID NO: 16391
  source 1..80: mol_type = other DNA

SEQ ID NO: 83375 - DNA, 80 bp, synthetic construct; identical to SEQ ID NO: 50151
  source 1..80: mol_type = other DNA

SEQ ID NO: 83376 - DNA, 80 bp, synthetic construct; identical to SEQ ID NO: 50152
  source 1..80: mol_type = other DNA

SEQ ID NO: 83377 - DNA, 80 bp, synthetic construct; identical to SEQ ID NO: 16392
  source 1..80: mol_type = other DNA

SEQ ID NO: 83378 - DNA, 80 bp, synthetic construct; identical to SEQ ID NO: 50156
  source 1..80: mol_type = other DNA

SEQ ID NO: 83379 - DNA, 80 bp, synthetic construct; identical to SEQ ID NO: 50158
  source 1..80: mol_type = other DNA

SEQ ID NO: 83380 - DNA, 80 bp, synthetic construct; identical to SEQ ID NO: 16394
  source 1..80: mol_type = other DNA

SEQ ID NO: 83381 - DNA, 80 bp, synthetic construct; identical to SEQ ID NO: 50162
  source 1..80: mol_type = other DNA

SEQ ID NO: 83382 - DNA, 80 bp, synthetic construct; identical to SEQ ID NO: 50163
  source 1..80: mol_type = other DNA

SEQ ID NO: 83383 - DNA, 80 bp, synthetic construct; identical to SEQ ID NO: 50165
  source 1..80: mol_type = other DNA

SEQ ID NO: 83384 - DNA, 80 bp, synthetic construct; identical to SEQ ID NO: 50167
  source 1..80: mol_type = other DNA

SEQ ID NO: 83385 - DNA, 80 bp, synthetic construct; identical to SEQ ID NO: 16396
  source 1..80: mol_type = other DNA

SEQ ID NO: 83386 - DNA, 80 bp, synthetic construct; identical to SEQ ID NO: 50171
  source 1..80: mol_type = other DNA

SEQ ID NO: 83387 - DNA, 80 bp, synthetic construct; identical to SEQ ID NO: 16397
  source 1..80: mol_type = other DNA

SEQ ID NO: 83388 - DNA, 80 bp, synthetic construct; identical to SEQ ID NO: 50175
  source 1..80: mol_type = other DNA

SEQ ID NO: 83389 - DNA, 80 bp, synthetic construct; identical to SEQ ID NO: 16398
  source 1..80: mol_type = other DNA

SEQ ID NO: 83390 - DNA, 80 bp, synthetic construct; identical to SEQ ID NO: 50179
  source 1..80: mol_type = other DNA

SEQ ID NO: 83391 - DNA, 80 bp, synthetic construct; identical to SEQ ID NO: 16399
  source 1..80: mol_type = other DNA

SEQ ID NO: 83392 - DNA, 80 bp, synthetic construct; identical to SEQ ID NO: 50181
  source 1..80: mol_type = other DNA

SEQ ID NO: 83393 - DNA, 80 bp, synthetic construct; identical to SEQ ID NO: 50182
  source 1..80: mol_type = other DNA

SEQ ID NO: 83394 - DNA, 80 bp, synthetic construct; identical to SEQ ID NO: 50183
  source 1..80: mol_type = other DNA

SEQ ID NO: 83395 - DNA, 80 bp, synthetic construct; identical to SEQ ID NO: 16400
  source 1..80: mol_type = other DNA

SEQ ID NO: 83396 - DNA, 80 bp, synthetic construct; identical to SEQ ID NO: 50185
  source 1..80: mol_type = other DNA

SEQ ID NO: 83397 - DNA, 80 bp, synthetic construct; identical to SEQ ID NO: 50186
  source 1..80: mol_type = other DNA

SEQ ID NO: 83398 - DNA, 80 bp, synthetic construct; identical to SEQ ID NO: 50188
  source 1..80: mol_type = other DNA

SEQ ID NO: 83399 - DNA, 80 bp, synthetic construct; identical to SEQ ID NO: 16401
  source 1..80: mol_type = other DNA

SEQ ID NO: 83400 - DNA, 80 bp, synthetic construct; identical to SEQ ID NO: 50190
  source 1..80: mol_type = other DNA

SEQ ID NO: 83401 - DNA, 80 bp, synthetic construct; identical to SEQ ID NO: 50191
  source 1..80: mol_type = other DNA

SEQ ID NO: 83402 - DNA, 80 bp, synthetic construct; identical to SEQ ID NO: 16402
  source 1..80: mol_type = other DNA

SEQ ID NO: 83403 - DNA, 80 bp, synthetic construct; identical to SEQ ID NO: 50193
  source 1..80: mol_type = other DNA

SEQ ID NO: 83404 - DNA, 80 bp, synthetic construct; identical to SEQ ID NO: 50194
  source 1..80: mol_type = other DNA

SEQ ID NO: 83405 - DNA, 80 bp, synthetic construct; identical to SEQ ID NO: 50195
  source 1..80: mol_type = other DNA

SEQ ID NO: 83406 - DNA, 80 bp, synthetic construct; identical to SEQ ID NO: 16403
  source 1..80: mol_type = other DNA

SEQ ID NO: 83407 - DNA, 80 bp, synthetic construct; identical to SEQ ID NO: 50198
  source 1..80: mol_type = other DNA

SEQ ID NO: 83408 - DNA, 80 bp, synthetic construct; identical to SEQ ID NO: 50199
  source 1..80: mol_type = other DNA

SEQ ID NO: 83409 - DNA, 80 bp, synthetic construct; identical to SEQ ID NO: 16404
  source 1..80: mol_type = other DNA

SEQ ID NO: 83410 - DNA, 80 bp, synthetic construct; identical to SEQ ID NO: 50202
  source 1..80: mol_type = other DNA

SEQ ID NO: 83411 - DNA, 80 bp, synthetic construct; identical to SEQ ID NO: 50203
  source 1..80: mol_type = other DNA

SEQ ID NO: 83412 - DNA, 80 bp, synthetic construct; identical to SEQ ID NO: 50204
  source 1..80: mol_type = other DNA

SEQ ID NO: 83413 - DNA, 80 bp, synthetic construct; identical to SEQ ID NO: 16405
  source 1..80: mol_type = other DNA

SEQ ID NO: 83414 - DNA, 80 bp, synthetic construct; identical to SEQ ID NO: 50206
  source 1..80: mol_type = other DNA

SEQ ID NO: 83415 - DNA, 80 bp, synthetic construct; identical to SEQ ID NO: 50207
  source 1..80: mol_type = other DNA

SEQ ID NO: 83416 - DNA, 80 bp, synthetic construct; identical to SEQ ID NO: 16406
  source 1..80: mol_type = other DNA

SEQ ID NO: 83417 - DNA, 80 bp, synthetic construct; identical to SEQ ID NO: 50210
  source 1..80: mol_type = other DNA

SEQ ID NO: 83418 - DNA, 80 bp, synthetic construct; identical to SEQ ID NO: 50211
  source 1..80: mol_type = other DNA

SEQ ID NO: 83419 - DNA, 80 bp, synthetic construct; identical to SEQ ID NO: 16407
  source 1..80: mol_type = other DNA

SEQ ID NO: 83420 - DNA, 80 bp, synthetic construct; identical to SEQ ID NO: 50214
  source 1..80: mol_type = other DNA

SEQ ID NO: 83421 - DNA, 80 bp, synthetic construct; identical to SEQ ID NO: 50215
  source 1..80: mol_type = other DNA

SEQ ID NO: 83422 - DNA, 80 bp, synthetic construct; identical to SEQ ID NO: 16408
  source 1..80: mol_type = other DNA

SEQ ID NO: 83423 - DNA, 80 bp, synthetic construct; identical to SEQ ID NO: 50217
  source 1..80: mol_type = other DNA

SEQ ID NO: 83424 - DNA, 80 bp, synthetic construct; identical to SEQ ID NO: 50218
  source 1..80: mol_type = other DNA

SEQ ID NO: 83425 - DNA, 80 bp, synthetic construct; identical to SEQ ID NO: 50219
  source 1..80: mol_type = other DNA

SEQ ID NO: 83426 - DNA, 80 bp, synthetic construct; identical to SEQ ID NO: 16409
  source 1..80: mol_type = other DNA

SEQ ID NO: 83427 - DNA, 80 bp, synthetic construct; identical to SEQ ID NO: 50221
  source 1..80: mol_type = other DNA

SEQ ID NO: 83428 - DNA, 80 bp, synthetic construct; identical to SEQ ID NO: 50222
  source 1..80: mol_type = other DNA

SEQ ID NO: 83429 - DNA, 80 bp, synthetic construct; identical to SEQ ID NO: 50223
  source 1..80: mol_type = other DNA

SEQ ID NO: 83430 - DNA, 80 bp, synthetic construct; identical to SEQ ID NO: 50224
  source 1..80: mol_type = other DNA

SEQ ID NO: 83431 - DNA, 80 bp, synthetic construct; identical to SEQ ID NO: 16410
  source 1..80: mol_type = other DNA

SEQ ID NO: 83432 - DNA, 80 bp, synthetic construct; identical to SEQ ID NO: 50226
  source 1..80: mol_type = other DNA

SEQ ID NO: 83433 - DNA, 80 bp, synthetic construct; identical to SEQ ID NO: 50227
  source 1..80: mol_type = other DNA

SEQ ID NO: 83434 - DNA, 80 bp, synthetic construct; identical to SEQ ID NO: 16411
  source 1..80: mol_type = other DNA

SEQ ID NO: 83435 - DNA, 80 bp, synthetic construct; identical to SEQ ID NO: 50229
  source 1..80: mol_type = other DNA

SEQ ID NO: 83436 - DNA, 80 bp, synthetic construct; identical to SEQ ID NO: 50230
  source 1..80: mol_type = other DNA

SEQ ID NO: 83437 - DNA, 80 bp, synthetic construct; identical to SEQ ID NO: 50231
  source 1..80: mol_type = other DNA

SEQ ID NO: 83438 - DNA, 80 bp, synthetic construct; identical to SEQ ID NO: 50232
  source 1..80: mol_type = other DNA

SEQ ID NO: 83439 - DNA, 80 bp, synthetic construct; identical to SEQ ID NO: 16412
  source 1..80: mol_type = other DNA

SEQ ID NO: 83440 - DNA, 80 bp, synthetic construct; identical to SEQ ID NO: 50235
  source 1..80: mol_type = other DNA

SEQ ID NO: 83441 - DNA, 80 bp, synthetic construct; identical to SEQ ID NO: 50236
  source 1..80: mol_type = other DNA

SEQ ID NO: 83442 - DNA, 80 bp, synthetic construct; identical to SEQ ID NO: 16413
  source 1..80: mol_type = other DNA

SEQ ID NO: 83443 - DNA, 80 bp, synthetic construct; identical to SEQ ID NO: 50238
  source 1..80: mol_type = other DNA

SEQ ID NO: 83444 - DNA, 80 bp, synthetic construct; identical to SEQ ID NO: 50239
  source 1..80: mol_type = other DNA

SEQ ID NO: 83445 - DNA, 80 bp, synthetic construct; identical to SEQ ID NO: 50240
  source 1..80: mol_type = other DNA

SEQ ID NO: 83446 - DNA, 80 bp, synthetic construct; identical to SEQ ID NO: 16414
  source 1..80: mol_type = other DNA

SEQ ID NO: 83447 - DNA, 80 bp, synthetic construct; identical to SEQ ID NO: 50242
  source 1..80: mol_type = other DNA

SEQ ID NO: 83448 - DNA, 80 bp, synthetic construct; identical to SEQ ID NO: 50244
  source 1..80: mol_type = other DNA

SEQ ID NO: 83449 - DNA, 80 bp, synthetic construct; identical to SEQ ID NO: 16415
  source 1..80: mol_type = other DNA

SEQ ID NO: 83450 - DNA, 80 bp, synthetic construct; identical to SEQ ID NO: 50246
  source 1..80: mol_type = other DNA

SEQ ID NO: 83451 - DNA, 80 bp, synthetic construct; identical to SEQ ID NO: 50247
  source 1..80: mol_type = other DNA

SEQ ID NO: 83452 - DNA, 80 bp, synthetic construct; identical to SEQ ID NO: 16416
  source 1..80: mol_type = other DNA

SEQ ID NO: 83453 - DNA, 80 bp, synthetic construct; identical to SEQ ID NO: 50249
  source 1..80: mol_type = other DNA

SEQ ID NO: 83454 - DNA, 80 bp, synthetic construct; identical to SEQ ID NO: 50250
  source 1..80: mol_type = other DNA

SEQ ID NO: 83455 - DNA, 80 bp, synthetic construct; identical to SEQ ID NO: 50251
  source 1..80: mol_type = other DNA

SEQ ID NO: 83456 - DNA, 80 bp, synthetic construct; identical to SEQ ID NO: 50252
  source 1..80: mol_type = other DNA

SEQ ID NO: 83457 - DNA, 80 bp, synthetic construct; identical to SEQ ID NO: 16417
  source 1..80: mol_type = other DNA

SEQ ID NO: 83458 - DNA, 80 bp, synthetic construct; identical to SEQ ID NO: 50254
  source 1..80: mol_type = other DNA

SEQ ID NO: 83459 - DNA, 80 bp, synthetic construct; identical to SEQ ID NO: 50255
  source 1..80: mol_type = other DNA

SEQ ID NO: 83460 - DNA, 80 bp, synthetic construct; identical to SEQ ID NO: 16418
  source 1..80: mol_type = other DNA

SEQ ID NO: 83461 - DNA, 80 bp, synthetic construct; identical to SEQ ID NO: 50257
  source 1..80: mol_type = other DNA

SEQ ID NO: 83462 - DNA, 80 bp, synthetic construct; identical to SEQ ID NO: 50258
  source 1..80: mol_type = other DNA

SEQ ID NO: 83463 - DNA, 80 bp, synthetic construct; identical to SEQ ID NO: 50259
  source 1..80: mol_type = other DNA

SEQ ID NO: 83464 - DNA, 80 bp, synthetic construct; identical to SEQ ID NO: 16419
  source 1..80: mol_type = other DNA

SEQ ID NO: 83465 - DNA, 80 bp, synthetic construct; identical to SEQ ID NO: 50262
  source 1..80: mol_type = other DNA

SEQ ID NO: 83466 - DNA, 80 bp, synthetic construct; identical to SEQ ID NO: 50263
  source 1..80: mol_type = other DNA

SEQ ID NO: 83467 - DNA, 80 bp, synthetic construct; identical to SEQ ID NO: 16420
  source 1..80: mol_type = other DNA

SEQ ID NO: 83468 - DNA, 80 bp, synthetic construct; identical to SEQ ID NO: 50266
  source 1..80: mol_type = other DNA

SEQ ID NO: 83469 - DNA, 80 bp, synthetic construct; identical to SEQ ID NO: 50267
  source 1..80: mol_type = other DNA

SEQ ID NO: 83470 - DNA, 80 bp, synthetic construct; identical to SEQ ID NO: 16421
  source 1..80: mol_type = other DNA

SEQ ID NO: 83471 - DNA, 80 bp, synthetic construct; identical to SEQ ID NO: 50269
  source 1..80: mol_type = other DNA

SEQ ID NO: 83472 - DNA, 80 bp, synthetic construct; identical to SEQ ID NO: 50270
  source 1..80: mol_type = other DNA

SEQ ID NO: 83473 - DNA, 80 bp, synthetic construct; identical to SEQ ID NO: 50271
  source 1..80: mol_type = other DNA

SEQ ID NO: 83474 - DNA, 80 bp, synthetic construct; identical to SEQ ID NO: 16422
  source 1..80: mol_type = other DNA

SEQ ID NO: 83475 - DNA, 80 bp, synthetic construct; identical to SEQ ID NO: 50273
  source 1..80: mol_type = other DNA

SEQ ID NO: 83476 - DNA, 80 bp, synthetic construct; identical to SEQ ID NO: 50274
  source 1..80: mol_type = other DNA

SEQ ID NO: 83477 - DNA, 80 bp, synthetic construct; identical to SEQ ID NO: 50275
  source 1..80: mol_type = other DNA

SEQ ID NO: 83478 - DNA, 80 bp, synthetic construct; identical to SEQ ID NO: 50276
  source 1..80: mol_type = other DNA

SEQ ID NO: 83479 - DNA, 80 bp, synthetic construct; identical to SEQ ID NO: 16423
  source 1..80: mol_type = other DNA

SEQ ID NO: 83480 - DNA, 80 bp, synthetic construct; identical to SEQ ID NO: 50278
  source 1..80: mol_type = other DNA

SEQ ID NO: 83481 - DNA, 80 bp, synthetic construct; identical to SEQ ID NO: 50279
  source 1..80: mol_type = other DNA

SEQ ID NO: 83482 - DNA, 80 bp, synthetic construct; identical to SEQ ID NO: 50280
  source 1..80: mol_type = other DNA

SEQ ID NO: 83483 - DNA, 80 bp, synthetic construct; identical to SEQ ID NO: 16424
  source 1..80: mol_type = other DNA

SEQ ID NO: 83484 - DNA, 80 bp, synthetic construct; identical to SEQ ID NO: 50282
  source 1..80: mol_type = other DNA

SEQ ID NO: 83485 - DNA, 80 bp, synthetic construct; identical to SEQ ID NO: 50284
  source 1..80: mol_type = other DNA

SEQ ID NO: 83486 - DNA, 80 bp, synthetic construct; identical to SEQ ID NO: 16425
  source 1..80: mol_type = other DNA

SEQ ID NO: 83487 - DNA, 80 bp, synthetic construct; identical to SEQ ID NO: 50286
  source 1..80: mol_type = other DNA

SEQ ID NO: 83488 - DNA, 80 bp, synthetic construct; identical to SEQ ID NO: 50287
  source 1..80: mol_type = other DNA

SEQ ID NO: 83489 - DNA, 80 bp, synthetic construct; identical to SEQ ID NO: 50288
  source 1..80: mol_type = other DNA

SEQ ID NO: 83490 - DNA, 80 bp, synthetic construct; identical to SEQ ID NO: 16426
  source 1..80: mol_type = other DNA

SEQ ID NO: 83491 - DNA, 80 bp, synthetic construct; identical to SEQ ID NO: 50290
  source 1..80: mol_type = other DNA

SEQ ID NO: 83492 - DNA, 80 bp, synthetic construct; identical to SEQ ID NO: 50291
  source 1..80: mol_type = other DNA

SEQ ID NO: 83493 - DNA, 80 bp, synthetic construct; identical to SEQ ID NO: 50292
  source 1..80: mol_type = other DNA

SEQ ID NO: 83494 - DNA, 80 bp, synthetic construct; identical to SEQ ID NO: 50293
  source 1..80: mol_type = other DNA

SEQ ID NO: 83495 - DNA, 80 bp, synthetic construct; identical to SEQ ID NO: 16427
  source 1..80: mol_type = other DNA

SEQ ID NO: 83496 - DNA, 80 bp, synthetic construct; identical to SEQ ID NO: 50295
  source 1..80: mol_type = other DNA

SEQ ID NO: 83497 - DNA, 80 bp, synthetic construct; identical to SEQ ID NO: 50296
  source 1..80: mol_type = other DNA

SEQ ID NO: 83498 - DNA, 80 bp, synthetic construct; identical to SEQ ID NO: 16428
  source 1..80: mol_type = other DNA

SEQ ID NO: 83499 - DNA, 80 bp, synthetic construct; identical to SEQ ID NO: 50298
  source 1..80: mol_type = other DNA

SEQ ID NO: 83500 - DNA, 80 bp, synthetic construct; identical to SEQ ID NO: 50299
  source 1..80: mol_type = other DNA

SEQ ID NO: 83501 - DNA, 80 bp, synthetic construct; identical to SEQ ID NO: 50300
  source 1..80: mol_type = other DNA

SEQ ID NO: 83502 - DNA, 80 bp, synthetic construct; identical to SEQ ID NO: 50301
  source 1..80: mol_type = other DNA

SEQ ID NO: 83503 - DNA, 80 bp, synthetic construct; identical to SEQ ID NO: 16429
  source 1..80: mol_type = other DNA

SEQ ID NO: 83504 - DNA, 80 bp, synthetic construct; identical to SEQ ID NO: 50303
  source 1..80: mol_type = other DNA

SEQ ID NO: 83505 - DNA, 80 bp, synthetic construct; identical to SEQ ID NO: 50304
  source 1..80: mol_type = other DNA

SEQ ID NO: 83506 - DNA, 80 bp, synthetic construct; identical to SEQ ID NO: 16430
  source 1..80: mol_type = other DNA

SEQ ID NO: 83507 - DNA, 80 bp, synthetic construct; identical to SEQ ID NO: 50307
  source 1..80: mol_type = other DNA

SEQ ID NO: 83508 - DNA, 80 bp, synthetic construct; identical to SEQ ID NO: 50308
  source 1..80: mol_type = other DNA

SEQ ID NO: 83509 - DNA, 80 bp, synthetic construct; identical to SEQ ID NO: 16431
  source 1..80: mol_type = other DNA

SEQ ID NO: 83510 - DNA, 80 bp, synthetic construct; identical to SEQ ID NO: 50310
  source 1..80: mol_type = other DNA

SEQ ID NO: 83511 - DNA, 80 bp, synthetic construct; identical to SEQ ID NO: 50311
  source 1..80: mol_type = other DNA

SEQ ID NO: 83512 - DNA, 80 bp, synthetic construct; identical to SEQ ID NO: 50312
  source 1..80: mol_type = other DNA

SEQ ID NO: 83513 - DNA, 80 bp, synthetic construct; identical to SEQ ID NO: 50313
  source 1..80: mol_type = other DNA

SEQ ID NO: 83514 - DNA, 80 bp, synthetic construct; identical to SEQ ID NO: 16432
  source 1..80: mol_type = other DNA

SEQ ID NO: 83515 - DNA, 80 bp, synthetic construct; identical to SEQ ID NO: 50315
  source 1..80: mol_type = other DNA

SEQ ID NO: 83516 - DNA, 80 bp, synthetic construct; identical to SEQ ID NO: 50316
  source 1..80: mol_type = other DNA

SEQ ID NO: 83517 - DNA, 80 bp, synthetic construct; identical to SEQ ID NO: 50318
  source 1..80: mol_type = other DNA

SEQ ID NO: 83518 - DNA, 80 bp, synthetic construct; identical to SEQ ID NO: 50319
  source 1..80: mol_type = other DNA

SEQ ID NO: 83519 - DNA, 80 bp, synthetic construct; identical to SEQ ID NO: 50320
  source 1..80: mol_type = other DNA

SEQ ID NO: 83520 - DNA, 80 bp, synthetic construct; identical to SEQ ID NO: 16434
  source 1..80: mol_type = other DNA

SEQ ID NO: 83521 - DNA, 80 bp, synthetic construct; identical to SEQ ID NO: 50322
  source 1..80: mol_type = other DNA

SEQ ID NO: 83522 - DNA, 80 bp, synthetic construct; identical to SEQ ID NO: 50323
  source 1..80: mol_type = other DNA

SEQ ID NO: 83523 - DNA, 80 bp, synthetic construct; identical to SEQ ID NO: 16435
  source 1..80: mol_type = other DNA

SEQ ID NO: 83524 - DNA, 80 bp, synthetic construct; identical to SEQ ID NO: 50325
  source 1..80: mol_type = other DNA

SEQ ID NO: 83525 - DNA, 80 bp, synthetic construct; identical to SEQ ID NO: 50326
  source 1..80: mol_type = other DNA

SEQ ID NO: 83526 - DNA, 80 bp, synthetic construct; identical to SEQ ID NO: 50327
  source 1..80: mol_type = other DNA

SEQ ID NO: 83527 - DNA, 80 bp, synthetic construct; identical to SEQ ID NO: 16436
  source 1..80: mol_type = other DNA

SEQ ID NO: 83528 - DNA, 80 bp, synthetic construct; identical to SEQ ID NO: 50329
  source 1..80: mol_type = other DNA

SEQ ID NO: 83529 - DNA, 80 bp, synthetic construct; identical to SEQ ID NO: 50330
  source 1..80: mol_type = other DNA

SEQ ID NO: 83530 - DNA, 80 bp, synthetic construct; identical to SEQ ID NO: 50331
  source 1..80: mol_type = other DNA

SEQ ID NO: 83531 - DNA, 80 bp, synthetic construct; identical to SEQ ID NO: 50332
  source 1..80: mol_type = other DNA

SEQ ID NO: 83532 - DNA, 80 bp, synthetic construct; identical to SEQ ID NO: 16437
  source 1..80: mol_type = other DNA

SEQ ID NO: 83533 - DNA, 80 bp, synthetic construct; identical to SEQ ID NO: 50334
  source 1..80: mol_type = other DNA

SEQ ID NO: 83534 - DNA, 80 bp, synthetic construct; identical to SEQ ID NO: 50335
  source 1..80: mol_type = other DNA

SEQ ID NO: 83535 - DNA, 80 bp, synthetic construct; identical to SEQ ID NO: 16438
  source 1..80: mol_type = other DNA

SEQ ID NO: 83536 - DNA, 80 bp, synthetic construct; identical to SEQ ID NO: 50337
  source 1..80: mol_type = other DNA

SEQ ID NO: 83537 - DNA, 80 bp, synthetic construct; identical to SEQ ID NO: 50338
  source 1..80: mol_type = other DNA

SEQ ID NO: 83538 - DNA, 80 bp, synthetic construct; identical to SEQ ID NO: 50339
  source 1..80: mol_type = other DNA

SEQ ID NO: 83539 - DNA, 80 bp, synthetic construct; identical to SEQ ID NO: 50340
  source 1..80: mol_type = other DNA

SEQ ID NO: 83540 - DNA, 80 bp, synthetic construct; identical to SEQ ID NO: 16439
  source 1..80: mol_type = other DNA

SEQ ID NO: 83541 - DNA, 80 bp, synthetic construct; identical to SEQ ID NO: 50342
  source 1..80: mol_type = other DNA

SEQ ID NO: 83542 - DNA, 80 bp, synthetic construct; identical to SEQ ID NO: 50343
  source 1..80: mol_type = other DNA

SEQ ID NO: 83543 - DNA, 80 bp, synthetic construct; identical to SEQ ID NO: 16440
  source 1..80: mol_type = other DNA

SEQ ID NO: 83544 - DNA, 80 bp, synthetic construct; identical to SEQ ID NO: 50345
  source 1..80: mol_type = other DNA

SEQ ID NO: 83545 - DNA, 80 bp, synthetic construct; identical to SEQ ID NO: 50346
  source 1..80: mol_type = other DNA

SEQ ID NO: 83546 - DNA, 80 bp, synthetic construct; identical to SEQ ID NO: 50347
  source 1..80: mol_type = other DNA

SEQ ID NO: 83547 - DNA, 80 bp, synthetic construct; identical to SEQ ID NO: 16441
  source 1..80: mol_type = other DNA

SEQ ID NO: 83548 - DNA, 80 bp, synthetic construct; identical to SEQ ID NO: 50349
  source 1..80: mol_type = other DNA

SEQ ID NO: 83549 - DNA, 80 bp, synthetic construct; identical to SEQ ID NO: 50350
  source 1..80: mol_type = other DNA

SEQ ID NO: 83550 - DNA, 80 bp, synthetic construct; identical to SEQ ID NO: 16442
  source 1..80: mol_type = other DNA

SEQ ID NO: 83551 - DNA, 80 bp, synthetic construct; identical to SEQ ID NO: 50353
  source 1..80: mol_type = other DNA

SEQ ID NO: 83552 - DNA, 80 bp, synthetic construct; identical to SEQ ID NO: 50354
  source 1..80: mol_type = other DNA

SEQ ID NO: 83553 - DNA, 80 bp, synthetic construct; identical to SEQ ID NO: 50355
  source 1..80: mol_type = other DNA

SEQ ID NO: 83554 - DNA, 80 bp, synthetic construct; identical to SEQ ID NO: 16443
  source 1..80: mol_type = other DNA

SEQ ID NO: 83555 - DNA, 80 bp, synthetic construct; identical to SEQ ID NO: 50357
  source 1..80: mol_type = other DNA

SEQ ID NO: 83556 - DNA, 80 bp, synthetic construct; identical to SEQ ID NO: 50358
  source 1..80: mol_type = other DNA

SEQ ID NO: 83557 - DNA, 80 bp, synthetic construct; identical to SEQ ID NO: 50359
  source 1..80: mol_type = other DNA

SEQ ID NO: 83558 - DNA, 80 bp, synthetic construct; identical to SEQ ID NO: 16444
  source 1..80: mol_type = other DNA

SEQ ID NO: 83559 - DNA, 80 bp, synthetic construct; identical to SEQ ID NO: 50361
  source 1..80: mol_type = other DNA

SEQ ID NO: 83560 - DNA, 80 bp, synthetic construct; identical to SEQ ID NO: 50362
  source 1..80: mol_type = other DNA

SEQ ID NO: 83561 - DNA, 80 bp, synthetic construct; identical to SEQ ID NO: 16445
  source 1..80: mol_type = other DNA

SEQ ID NO: 83562 - DNA, 80 bp, synthetic construct; identical to SEQ ID NO: 50365
  source 1..80: mol_type = other DNA

SEQ ID NO: 83563 - DNA, 80 bp, synthetic construct; identical to SEQ ID NO: 50366
  source 1..80: mol_type = other DNA

SEQ ID NO: 83564 - DNA, 80 bp, synthetic construct; identical to SEQ ID NO: 50367
  source 1..80: mol_type = other DNA

SEQ ID NO: 83565 - DNA, 80 bp, synthetic construct; identical to SEQ ID NO: 16446
  source 1..80: mol_type = other DNA

SEQ ID NO: 83566 - DNA, 80 bp, synthetic construct; identical to SEQ ID NO: 50369
  source 1..80: mol_type = other DNA

SEQ ID NO: 83567 - DNA, 80 bp, synthetic construct; identical to SEQ ID NO: 50370
  source 1..80: mol_type = other DNA

SEQ ID NO: 83568 - DNA, 80 bp, synthetic construct; identical to SEQ ID NO: 50371
  source 1..80: mol_type = other DNA

SEQ ID NO: 83569 - DNA, 80 bp, synthetic construct; identical to SEQ ID NO: 16447
  source 1..80: mol_type = other DNA

SEQ ID NO: 83570 - DNA, 80 bp, synthetic construct; identical to SEQ ID NO: 50373
  source 1..80: mol_type = other DNA

SEQ ID NO: 83571 - DNA, 80 bp, synthetic construct; identical to SEQ ID NO: 50374
  source 1..80: mol_type = other DNA

SEQ ID NO: 83572 - DNA, 80 bp, synthetic construct; identical to SEQ ID NO: 50375
  source 1..80: mol_type = other DNA

SEQ ID NO: 83573 - DNA, 80 bp, synthetic construct; identical to SEQ ID NO: 16448
  source 1..80: mol_type = other DNA

SEQ ID NO: 83574 - DNA, 80 bp, synthetic construct; identical to SEQ ID NO: 50377
  source 1..80: mol_type = other DNA

SEQ ID NO: 83575 - DNA, 80 bp, synthetic construct; identical to SEQ ID NO: 50378
  source 1..80: mol_type = other DNA

SEQ ID NO: 83576 - DNA, 80 bp, synthetic construct; identical to SEQ ID NO: 50379
  source 1..80: mol_type = other DNA

SEQ ID NO: 83577 - DNA, 80 bp, synthetic construct; identical to SEQ ID NO: 16449
  source 1..80: mol_type = other DNA

SEQ ID NO: 83578 - DNA, 80 bp, synthetic construct; identical to SEQ ID NO: 50381
  source 1..80: mol_type = other DNA

SEQ ID NO: 83579 - DNA, 80 bp, synthetic construct; identical to SEQ ID NO: 50382
  source 1..80: mol_type = other DNA

SEQ ID NO: 83580 - DNA, 80 bp, synthetic construct; identical to SEQ ID NO: 16450
  source 1..80: mol_type = other DNA

SEQ ID NO: 83581 - DNA, 80 bp, synthetic construct; identical to SEQ ID NO: 50385
  source 1..80: mol_type = other DNA

SEQ ID NO: 83582 - DNA, 80 bp, synthetic construct; identical to SEQ ID NO: 50386
  source 1..80: mol_type = other DNA

SEQ ID NO: 83583 - DNA, 80 bp, synthetic construct; identical to SEQ ID NO: 50387
  source 1..80: mol_type = other DNA

SEQ ID NO: 83584 - DNA, 80 bp, synthetic construct; identical to SEQ ID NO: 16451
  source 1..80: mol_type = other DNA

SEQ ID NO: 83585 - DNA, 80 bp, synthetic construct; identical to SEQ ID NO: 50390
  source 1..80: mol_type = other DNA

SEQ ID NO: 83586 - DNA, 80 bp, synthetic construct; identical to SEQ ID NO: 50391
  source 1..80: mol_type = other DNA

SEQ ID NO: 83587 - DNA, 80 bp, synthetic construct; identical to SEQ ID NO: 16452
  source 1..80: mol_type = other DNA

SEQ ID NO: 83588 - DNA, 80 bp, synthetic construct; identical to SEQ ID NO: 50393
  source 1..80: mol_type = other DNA

SEQ ID NO: 83589 - DNA, 80 bp, synthetic construct; identical to SEQ ID NO: 50394
  source 1..80: mol_type = other DNA

SEQ ID NO: 83590 - DNA, 80 bp, synthetic construct; identical to SEQ ID NO: 50395
  source 1..80: mol_type = other DNA

SEQ ID NO: 83591 - DNA, 80 bp, synthetic construct; identical to SEQ ID NO: 16453
  source 1..80: mol_type = other DNA

SEQ ID NO: 83592 - DNA, 80 bp, synthetic construct; identical to SEQ ID NO: 50397
  source 1..80: mol_type = other DNA

SEQ ID NO: 83593 - DNA, 80 bp, synthetic construct; identical to SEQ ID NO: 50398
  source 1..80: mol_type = other DNA

SEQ ID NO: 83594 - DNA, 80 bp, synthetic construct; identical to SEQ ID NO: 50399
  source 1..80: mol_type = other DNA

SEQ ID NO: 83595 - DNA, 80 bp, synthetic construct; identical to SEQ ID NO: 50400
  source 1..80: mol_type = other DNA

SEQ ID NO: 83596 - DNA, 80 bp, synthetic construct; identical to SEQ ID NO: 16454
  source 1..80: mol_type = other DNA

SEQ ID NO: 83597 - DNA, 80 bp, synthetic construct; identical to SEQ ID NO: 50402
  source 1..80: mol_type = other DNA

SEQ ID NO: 83598 - DNA, 80 bp, synthetic construct; identical to SEQ ID NO: 50403
  source 1..80: mol_type = other DNA

SEQ ID NO: 83599 - DNA, 80 bp, synthetic construct; identical to SEQ ID NO: 16455
  source 1..80: mol_type = other DNA

SEQ ID NO: 83600 - DNA, 80 bp, synthetic construct; identical to SEQ ID NO: 50405
  source 1..80: mol_type = other DNA

SEQ ID NO: 83601 - DNA, 80 bp, synthetic construct; identical to SEQ ID NO: 50406
  source 1..80: mol_type = other DNA

SEQ ID NO: 83602 - DNA, 80 bp, synthetic construct; identical to SEQ ID NO: 16456
  source 1..80: mol_type = other DNA

SEQ ID NO: 83603 - DNA, 80 bp, synthetic construct; identical to SEQ ID NO: 50409
  source 1..80: mol_type = other DNA

SEQ ID NO: 83604 - DNA, 80 bp, synthetic construct; identical to SEQ ID NO: 50410
  source 1..80: mol_type = other DNA

SEQ ID NO: 83605 - DNA, 80 bp, synthetic construct; identical to SEQ ID NO: 50411
  source 1..80: mol_type = other DNA

SEQ ID NO: 83606 - DNA, 80 bp, synthetic construct; identical to SEQ ID NO: 16457
  source 1..80: mol_type = other DNA

SEQ ID NO: 83607 - DNA, 80 bp, synthetic construct; identical to SEQ ID NO: 50414
  source 1..80: mol_type = other DNA

SEQ ID NO: 83608 - DNA, 80 bp, synthetic construct; identical to SEQ ID NO: 50416
  source 1..80: mol_type = other DNA

SEQ ID NO: 83609 - DNA, 80 bp, synthetic construct; identical to SEQ ID NO: 16458
  source 1..80: mol_type = other DNA

SEQ ID NO: 83610 - DNA, 80 bp, synthetic construct; identical to SEQ ID NO: 50418
  source 1..80: mol_type = other DNA

SEQ ID NO: 83611 - DNA, 80 bp, synthetic construct; identical to SEQ ID NO: 50419
  source 1..80: mol_type = other DNA

SEQ ID NO: 83612 - DNA, 80 bp, synthetic construct; identical to SEQ ID NO: 16459
  source 1..80: mol_type = other DNA

SEQ ID NO: 83613 - DNA, 80 bp, synthetic construct; identical to SEQ ID NO: 50422
  source 1..80: mol_type = other DNA

SEQ ID NO: 83614 - DNA, 80 bp, synthetic construct; identical to SEQ ID NO: 50423
  source 1..80: mol_type = other DNA

SEQ ID NO: 83615 - DNA, 80 bp, synthetic construct; identical to SEQ ID NO: 16460
  source 1..80: mol_type = other DNA

SEQ ID NO: 83616 - DNA, 80 bp, synthetic construct; identical to SEQ ID NO: 50425
  source 1..80: mol_type = other DNA

SEQ ID NO: 83617 - DNA, 80 bp, synthetic construct; identical to SEQ ID NO: 50426
  source 1..80: mol_type = other DNA

SEQ ID NO: 83618 - DNA, 80 bp, synthetic construct; identical to SEQ ID NO: 16461
  source 1..80: mol_type = other DNA

SEQ ID NO: 83619 - DNA, 80 bp, synthetic construct; identical to SEQ ID NO: 50429
  source 1..80: mol_type = other DNA

SEQ ID NO: 83620 - DNA, 80 bp, synthetic construct; identical to SEQ ID NO: 50430
  source 1..80: mol_type = other DNA

SEQ ID NO: 83621 - DNA, 80 bp, synthetic construct; identical to SEQ ID NO: 50431
  source 1..80: mol_type = other DNA

SEQ ID NO: 83622 - DNA, 80 bp, synthetic construct; identical to SEQ ID NO: 50432
  source 1..80: mol_type = other DNA

SEQ ID NO: 83623 - DNA, 80 bp, synthetic construct; identical to SEQ ID NO: 16462
  source 1..80: mol_type = other DNA

SEQ ID NO: 83624 - DNA, 80 bp, synthetic construct; identical to SEQ ID NO: 50434
  source 1..80: mol_type = other DNA

SEQ ID NO: 83625 - DNA, 80 bp, synthetic construct; identical to SEQ ID NO: 50435
  source 1..80: mol_type = other DNA

SEQ ID NO: 83626 - DNA, 80 bp, synthetic construct; identical to SEQ ID NO: 50436
  source 1..80: mol_type = other DNA

SEQ ID NO: 83627 - DNA, 80 bp, synthetic construct; identical to SEQ ID NO: 16463
  source 1..80: mol_type = other DNA

SEQ ID NO: 83628 - DNA, 80 bp, synthetic construct; identical to SEQ ID NO: 50438
  source 1..80: mol_type = other DNA

SEQ ID NO: 83629 - DNA, 80 bp, synthetic construct; identical to SEQ ID NO: 50439
  source 1..80: mol_type = other DNA

SEQ ID NO: 83630 - DNA, 80 bp, synthetic construct; identical to SEQ ID NO: 16464
  source 1..80: mol_type = other DNA

SEQ ID NO: 83631 - DNA, 80 bp, synthetic construct; identical to SEQ ID NO: 50441
  source 1..80: mol_type = other DNA

SEQ ID NO: 83632 - DNA, 80 bp, synthetic construct; identical to SEQ ID NO: 50442
  source 1..80: mol_type = other DNA

SEQ ID NO: 83633 - DNA, 80 bp, synthetic construct; identical to SEQ ID NO: 50443
  source 1..80: mol_type = other DNA

SEQ ID NO: 83634 - DNA, 80 bp, synthetic construct; identical to SEQ ID NO: 50444
  source 1..80: mol_type = other DNA

SEQ ID NO: 83635 - DNA, 80 bp, synthetic construct; identical to SEQ ID NO: 16465
  source 1..80: mol_type = other DNA

SEQ ID NO: 83636 - DNA, 80 bp, synthetic construct; identical to SEQ ID NO: 50446
  source 1..80: mol_type = other DNA

SEQ ID NO: 83637 - DNA, 80 bp, synthetic construct; identical to SEQ ID NO: 50447
  source 1..80: mol_type = other DNA

SEQ ID NO: 83638 - DNA, 80 bp, synthetic construct; identical to SEQ ID NO: 16466
  source 1..80: mol_type = other DNA

SEQ ID NO: 83639 - DNA, 80 bp, synthetic construct; identical to SEQ ID NO: 50449
  source 1..80: mol_type = other DNA

SEQ ID NO: 83640 - DNA, 80 bp, synthetic construct; identical to SEQ ID NO: 50450
  source 1..80: mol_type = other DNA

SEQ ID NO: 83641 - DNA, 80 bp, synthetic construct; identical to SEQ ID NO: 50451
  source 1..80: mol_type = other DNA

SEQ ID NO: 83642 - DNA, 80 bp, synthetic construct; identical to SEQ ID NO: 50452
  source 1..80: mol_type = other DNA

SEQ ID NO: 83643 - DNA, 80 bp, synthetic construct; identical to SEQ ID NO: 16467
  source 1..80: mol_type = other DNA

SEQ ID NO: 83644 - DNA, 80 bp, synthetic construct; identical to SEQ ID NO: 50455
  source 1..80: mol_type = other DNA

SEQ ID NO: 83645 - DNA, 80 bp, synthetic construct; identical to SEQ ID NO: 50456
  source 1..80: mol_type = other DNA

SEQ ID NO: 83646 - DNA, 80 bp, synthetic construct; identical to SEQ ID NO: 16468
  source 1..80: mol_type = other DNA

SEQ ID NO: 83647 - DNA, 80 bp, synthetic construct; identical to SEQ ID NO: 50458
  source 1..80: mol_type = other DNA

SEQ ID NO: 83648 - DNA, 80 bp, synthetic construct; identical to SEQ ID NO: 50459
  source 1..80: mol_type = other DNA

SEQ ID NO: 83649 - DNA, 80 bp, synthetic construct; identical to SEQ ID NO: 16469
  source 1..80: mol_type = other DNA

SEQ ID NO: 83650 - DNA, 80 bp, synthetic construct; identical to SEQ ID NO: 50461
  source 1..80: mol_type = other DNA

SEQ ID NO: 83651 - DNA, 80 bp, synthetic construct; identical to SEQ ID NO: 50462
  source 1..80: mol_type = other DNA

SEQ ID NO: 83652 - DNA, 80 bp, synthetic construct; identical to SEQ ID NO: 50463
  source 1..80: mol_type = other DNA

SEQ ID NO: 83653 - DNA, 80 bp, synthetic construct; identical to SEQ ID NO: 50464
  source 1..80: mol_type = other DNA

SEQ ID NO: 83654 - DNA, 80 bp, synthetic construct; identical to SEQ ID NO: 16470
  source 1..80: mol_type = other DNA

SEQ ID NO: 83655 - DNA, 80 bp, synthetic construct; identical to SEQ ID NO: 50466
  source 1..80: mol_type = other DNA

SEQ ID NO: 83656 - DNA, 80 bp, synthetic construct; identical to SEQ ID NO: 50467
  source 1..80: mol_type = other DNA

SEQ ID NO: 83657 - DNA, 80 bp, synthetic construct; identical to SEQ ID NO: 16471
  source 1..80: mol_type = other DNA

SEQ ID NO: 83658 - DNA, 80 bp, synthetic construct; identical to SEQ ID NO: 50469
  source 1..80: mol_type = other DNA

SEQ ID NO: 83659 - DNA, 80 bp, synthetic construct; identical to SEQ ID NO: 50470
  source 1..80: mol_type = other DNA

SEQ ID NO: 83660 - DNA, 80 bp, synthetic construct; identical to SEQ ID NO: 50471
  source 1..80: mol_type = other DNA

SEQ ID NO: 83661 - DNA, 80 bp, synthetic construct; identical to SEQ ID NO: 50472
  source 1..80: mol_type = other DNA

SEQ ID NO: 83662 - DNA, 80 bp, synthetic construct; identical to SEQ ID NO: 16472
  source 1..80: mol_type = other DNA

SEQ ID NO: 83663 - DNA, 80 bp, synthetic construct; identical to SEQ ID NO: 50474
  source 1..80: mol_type = other DNA

SEQ ID NO: 83664 - DNA, 80 bp, synthetic construct; identical to SEQ ID NO: 50475
  source 1..80: mol_type = other DNA

SEQ ID NO: 83665 - DNA, 80 bp, synthetic construct; identical to SEQ ID NO: 16473
  source 1..80: mol_type = other DNA

SEQ ID NO: 83666 - DNA, 80 bp, synthetic construct; identical to SEQ ID NO: 50477
  source 1..80: mol_type = other DNA

SEQ ID NO: 83667 - DNA, 80 bp, synthetic construct; identical to SEQ ID NO: 50478
  source 1..80: mol_type = other DNA

SEQ ID NO: 83668 - DNA, 80 bp, synthetic construct; identical to SEQ ID NO: 50479
  source 1..80: mol_type = other DNA

SEQ ID NO: 83669 - DNA, 80 bp, synthetic construct; identical to SEQ ID NO: 16474
  source 1..80: mol_type = other DNA

SEQ ID NO: 83670 - DNA, 80 bp, synthetic construct; identical to SEQ ID NO: 50481
  source 1..80: mol_type = other DNA

SEQ ID NO: 83671 - DNA, 80 bp, synthetic construct; identical to SEQ ID NO: 50482
  source 1..80: mol_type = other DNA

SEQ ID NO: 83672 - DNA, 80 bp, synthetic construct; identical to SEQ ID NO: 50483
  source 1..80: mol_type = other DNA

SEQ ID NO: 83673 - DNA, 80 bp, synthetic construct; identical to SEQ ID NO: 16475
  source 1..80: mol_type = other DNA

SEQ ID NO: 83674 - DNA, 80 bp, synthetic construct; identical to SEQ ID NO: 50485
  source 1..80: mol_type = other DNA

SEQ ID NO: 83675 - DNA, 80 bp, synthetic construct; identical to SEQ ID NO: 50486
  source 1..80: mol_type = other DNA

SEQ ID NO: 83676 - DNA, 80 bp, synthetic construct; identical to SEQ ID NO: 50487
  source 1..80: mol_type = other DNA

SEQ ID NO: 83677 - DNA, 80 bp, synthetic construct; identical to SEQ ID NO: 50488
  source 1..80: mol_type = other DNA

SEQ ID NO: 83678 - DNA, 80 bp, synthetic construct; identical to SEQ ID NO: 16476
  source 1..80: mol_type = other DNA

SEQ ID NO: 83679 - DNA, 80 bp, synthetic construct; identical to SEQ ID NO: 50491
  source 1..80: mol_type = other DNA

SEQ ID NO: 83680 - DNA, 80 bp, synthetic construct; identical to SEQ ID NO: 50492
  source 1..80: mol_type = other DNA

SEQ ID NO: 83681 - DNA, 80 bp, synthetic construct; identical to SEQ ID NO: 16477
  source 1..80: mol_type = other DNA

SEQ ID NO: 83682 - DNA, 80 bp, synthetic construct; identical to SEQ ID NO: 50494
  source 1..80: mol_type = other DNA

SEQ ID NO: 83683 - DNA, 80 bp, synthetic construct; identical to SEQ ID NO: 50495
  source 1..80: mol_type = other DNA

SEQ ID NO: 83684 - DNA, 80 bp, synthetic construct; identical to SEQ ID NO: 16478
  source 1..80: mol_type = other DNA

SEQ ID NO: 83685 - DNA, 80 bp, synthetic construct; identical to SEQ ID NO: 50497
  source 1..80: mol_type = other DNA

SEQ ID NO: 83686 - DNA, 80 bp, synthetic construct; identical to SEQ ID NO: 50498
  source 1..80: mol_type = other DNA

SEQ ID NO: 83687 - DNA, 80 bp, synthetic construct; identical to SEQ ID NO: 50499
  source 1..80: mol_type = other DNA

SEQ ID NO: 83688 - DNA, 80 bp, synthetic construct; identical to SEQ ID NO: 16479
  source 1..80: mol_type = other DNA

SEQ ID NO: 83689 - DNA, 80 bp, synthetic construct; identical to SEQ ID NO: 50501
  source 1..80: mol_type = other DNA

SEQ ID NO: 83690 - DNA, 80 bp, synthetic construct; identical to SEQ ID NO: 50502
  source 1..80: mol_type = other DNA

SEQ ID NO: 83691 - DNA, 80 bp, synthetic construct; identical to SEQ ID NO: 50503
  source 1..80: mol_type = other DNA

SEQ ID NO: 83692 - DNA, 80 bp, synthetic construct; identical to SEQ ID NO: 16480
  source 1..80: mol_type = other DNA

SEQ ID NO: 83693 - DNA, 80 bp, synthetic construct; identical to SEQ ID NO: 50505
  source 1..80: mol_type = other DNA

SEQ ID NO: 83694 - DNA, 80 bp, synthetic construct; identical to SEQ ID NO: 50506
  source 1..80: mol_type = other DNA

SEQ ID NO: 83695 - DNA, 80 bp, synthetic construct; identical to SEQ ID NO: 50508
  source 1..80: mol_type = other DNA

SEQ ID NO: 83696 - DNA, 80 bp, synthetic construct; identical to SEQ ID NO: 50509
  source 1..80: mol_type = other DNA

SEQ ID NO: 83697 - DNA, 80 bp, synthetic construct; identical to SEQ ID NO: 16481
  source 1..80: mol_type = other DNA

SEQ ID NO: 83698 - DNA, 80 bp, synthetic construct; identical to SEQ ID NO: 50511
  source 1..80: mol_type = other DNA

SEQ ID NO: 83699 - DNA, 80 bp, synthetic construct; identical to SEQ ID NO: 50512
  source 1..80: mol_type = other DNA

SEQ ID NO: 83700 - DNA, 80 bp, synthetic construct; identical to SEQ ID NO: 50513
  source 1..80: mol_type = other DNA

SEQ ID NO: 83701 - DNA, 80 bp, synthetic construct; identical to SEQ ID NO: 16482
  source 1..80: mol_type = other DNA

SEQ ID NO: 83702 - DNA, 80 bp, synthetic construct; identical to SEQ ID NO: 50515
  source 1..80: mol_type = other DNA

SEQ ID NO: 83703 - DNA, 80 bp, synthetic construct; identical to SEQ ID NO: 50516
  source 1..80: mol_type = other DNA

SEQ ID NO: 83704 - DNA, 80 bp, synthetic construct; identical to SEQ ID NO: 50517
  source 1..80: mol_type = other DNA

SEQ ID NO: 83705 - DNA, 80 bp, synthetic construct; identical to SEQ ID NO: 16483
  source 1..80: mol_type = other DNA

SEQ ID NO: 83706 - DNA, 80 bp, synthetic construct; identical to SEQ ID NO: 50519
  source 1..80: mol_type = other DNA

SEQ ID NO: 83707 - DNA, 80 bp, synthetic construct; identical to SEQ ID NO: 50520
  source 1..80: mol_type = other DNA

SEQ ID NO: 83708 - DNA, 80 bp, synthetic construct; identical to SEQ ID NO: 16484
  source 1..80: mol_type = other DNA

SEQ ID NO: 83709 - DNA, 80 bp, synthetic construct; identical to SEQ ID NO: 50522
  source 1..80: mol_type = other DNA

SEQ ID NO: 83710 - DNA, 80 bp, synthetic construct; identical to SEQ ID NO: 50523
  source 1..80: mol_type = other DNA

SEQ ID NO: 83711 - DNA, 80 bp, synthetic construct; identical to SEQ ID NO: 50524
  source 1..80: mol_type = other DNA

SEQ ID NO: 83712 - DNA, 80 bp, synthetic construct; identical to SEQ ID NO: 50525
  source 1..80: mol_type = other DNA

SEQ ID NO: 83713 - DNA, 80 bp, synthetic construct; identical to SEQ ID NO: 16485
  source 1..80: mol_type = other DNA

SEQ ID NO: 83714 - DNA, 80 bp, synthetic construct; identical to SEQ ID NO: 50527
  source 1..80: mol_type = other DNA

SEQ ID NO: 83715 - DNA, 80 bp, synthetic construct; identical to SEQ ID NO: 50528
  source 1..80: mol_type = other DNA

SEQ ID NO: 83716 - DNA, 80 bp, synthetic construct; identical to SEQ ID NO: 16486
  source 1..80: mol_type = other DNA

SEQ ID NO: 83717 - DNA, 80 bp, synthetic construct; identical to SEQ ID NO: 50530
  source 1..80: mol_type = other DNA

SEQ ID NO: 83718 - DNA, 80 bp, synthetic construct; identical to SEQ ID NO: 50531
  source 1..80: mol_type = other DNA

SEQ ID NO: 83719 - DNA, 80 bp, synthetic construct; identical to SEQ ID NO: 50532
  source 1..80: mol_type = other DNA

SEQ ID NO: 83720 - DNA, 80 bp, synthetic construct; identical to SEQ ID NO: 16487
  source 1..80: mol_type = other DNA

SEQ ID NO: 83721 - DNA, 80 bp, synthetic construct; identical to SEQ ID NO: 50534
  source 1..80: mol_type = other DNA

SEQ ID NO: 83722 - DNA, 80 bp, synthetic construct; identical to SEQ ID NO: 50535
  source 1..80: mol_type = other DNA

SEQ ID NO: 83723 - DNA, 80 bp, synthetic construct; identical to SEQ ID NO: 50536
  source 1..80: mol_type = other DNA

SEQ ID NO: 83724 - DNA, 80 bp, synthetic construct; identical to SEQ ID NO: 16488
  source 1..80: mol_type = other DNA

SEQ ID NO: 83725 - DNA, 80 bp, synthetic construct; identical to SEQ ID NO: 50538
  source 1..80: mol_type = other DNA

SEQ ID NO: 83726 - DNA, 80 bp, synthetic construct; identical to SEQ ID NO: 50539
  source 1..80: mol_type = other DNA

SEQ ID NO: 83727 - DNA, 80 bp, synthetic construct; identical to SEQ ID NO: 50540
  source 1..80: mol_type = other DNA

SEQ ID NO: 83728 - DNA, 80 bp, synthetic construct; identical to SEQ ID NO: 50541
  source 1..80: mol_type = other DNA

SEQ ID NO: 83729 - DNA, 80 bp, synthetic construct; identical to SEQ ID NO: 16489
  source 1..80: mol_type = other DNA

SEQ ID NO: 83730 - DNA, 80 bp, synthetic construct; identical to SEQ ID NO: 50543
  source 1..80: mol_type = other DNA

SEQ ID NO: 83731 - DNA, 80 bp, synthetic construct; identical to SEQ ID NO: 50545
  source 1..80: mol_type = other DNA

SEQ ID NO: 83732 - DNA, 80 bp, synthetic construct; identical to SEQ ID NO: 16490
  source 1..80: mol_type = other DNA

SEQ ID NO: 83733 - DNA, 80 bp, synthetic construct; identical to SEQ ID NO: 50547
  source 1..80: mol_type = other DNA

SEQ ID NO: 83734 - DNA, 80 bp, synthetic construct; identical to SEQ ID NO: 50548
  source 1..80: mol_type = other DNA

SEQ ID NO: 83735 - DNA, 80 bp, synthetic construct; identical to SEQ ID NO: 50549
  source 1..80: mol_type = other DNA

SEQ ID NO: 83736 - DNA, 80 bp, synthetic construct; identical to SEQ ID NO: 16491
  source 1..80: mol_type = other DNA

SEQ ID NO: 83737 - DNA, 80 bp, synthetic construct; identical to SEQ ID NO: 50551
  source 1..80: mol_type = other DNA

SEQ ID NO: 83738 - DNA, 80 bp, synthetic construct; identical to SEQ ID NO: 50552
  source 1..80: mol_type = other DNA

SEQ ID NO: 83739 - DNA, 80 bp, synthetic construct; identical to SEQ ID NO: 50553
  source 1..80: mol_type = other DNA

SEQ ID NO: 83740 - DNA, 80 bp, synthetic construct; identical to SEQ ID NO: 16492
  source 1..80: mol_type = other DNA

SEQ ID NO: 83741 - DNA, 80 bp, synthetic construct; identical to SEQ ID NO: 50555
  source 1..80: mol_type = other DNA

SEQ ID NO: 83742 - DNA, 80 bp, synthetic construct; identical to SEQ ID NO: 50556
  source 1..80: mol_type = other DNA

SEQ ID NO: 83743 - DNA, 80 bp, synthetic construct; identical to SEQ ID NO: 16493
  source 1..80: mol_type = other DNA

SEQ ID NO: 83744 - DNA, 80 bp, synthetic construct; identical to SEQ ID NO: 50558
  source 1..80: mol_type = other DNA

SEQ ID NO: 83745 - DNA, 80 bp, synthetic construct; identical to SEQ ID NO: 50559
  source 1..80: mol_type = other DNA

SEQ ID NO: 83746 - DNA, 80 bp, synthetic construct; identical to SEQ ID NO: 50561
  source 1..80: mol_type = other DNA

SEQ ID NO: 83747 - DNA, 80 bp, synthetic construct; identical to SEQ ID NO: 16494
  source 1..80: mol_type = other DNA

SEQ ID NO: 83748 - DNA, 80 bp, synthetic construct; identical to SEQ ID NO: 50563
  source 1..80: mol_type = other DNA

SEQ ID NO: 83749 - DNA, 80 bp, synthetic construct; identical to SEQ ID NO: 50564
  source 1..80: mol_type = other DNA

SEQ ID NO: 83750 - DNA, 80 bp, synthetic construct; identical to SEQ ID NO: 16495
  source 1..80: mol_type = other DNA

SEQ ID NO: 83751 - DNA, 80 bp, synthetic construct; identical to SEQ ID NO: 50566
  source 1..80: mol_type = other DNA

SEQ ID NO: 83752 - DNA, 80 bp, synthetic construct; identical to SEQ ID NO: 50567
  source 1..80: mol_type = other DNA

SEQ ID NO: 83753 - DNA, 80 bp, synthetic construct; identical to SEQ ID NO: 50568
  source 1..80: mol_type = other DNA

SEQ ID NO: 83754 - DNA, 80 bp, synthetic construct; identical to SEQ ID NO: 16496
  source 1..80: mol_type = other DNA

SEQ ID NO: 83755 - DNA, 80 bp, synthetic construct; identical to SEQ ID NO: 50570
  source 1..80: mol_type = other DNA

SEQ ID NO: 83756 - DNA, 80 bp, synthetic construct; identical to SEQ ID NO: 50571
  source 1..80: mol_type = other DNA

SEQ ID NO: 83757 - DNA, 80 bp, synthetic construct; identical to SEQ ID NO: 50572
  source 1..80: mol_type = other DNA

SEQ ID NO: 83758 - DNA, 80 bp, synthetic construct; identical to SEQ ID NO: 16497
  source 1..80: mol_type = other DNA

SEQ ID NO: 83759 - DNA, 80 bp, synthetic construct; identical to SEQ ID NO: 50575
  source 1..80: mol_type = other DNA

SEQ ID NO: 83760 - DNA, 80 bp, synthetic construct; identical to SEQ ID NO: 50576
  source 1..80: mol_type = other DNA

SEQ ID NO: 83761 - DNA, 80 bp, synthetic construct; identical to SEQ ID NO: 50577
  source 1..80: mol_type = other DNA

SEQ ID NO: 83762 - DNA, 80 bp, synthetic construct; identical to SEQ ID NO: 16498
  source 1..80: mol_type = other DNA

SEQ ID NO: 83763 - DNA, 80 bp, synthetic construct; identical to SEQ ID NO: 50580
  source 1..80: mol_type = other DNA

SEQ ID NO: 83764 - DNA, 80 bp, synthetic construct; identical to SEQ ID NO: 50581
  source 1..80: mol_type = other DNA

SEQ ID NO: 83765 - DNA, 80 bp, synthetic construct; identical to SEQ ID NO: 50583
  source 1..80: mol_type = other DNA

SEQ ID NO: 83766 - DNA, 80 bp, synthetic construct; identical to SEQ ID NO: 50584
  source 1..80: mol_type = other DNA

SEQ ID NO: 83767 - DNA, 80 bp, synthetic construct; identical to SEQ ID NO: 50585
  source 1..80: mol_type = other DNA

SEQ ID NO: 83768 - DNA, 80 bp, synthetic construct; identical to SEQ ID NO: 50586
  source 1..80: mol_type = other DNA

SEQ ID NO: 83769 - DNA, 80 bp, synthetic construct; identical to SEQ ID NO: 16500
  source 1..80: mol_type = other DNA

SEQ ID NO: 83770 - DNA, 80 bp, synthetic construct; identical to SEQ ID NO: 50588
  source 1..80: mol_type = other DNA

SEQ ID NO: 83771 - DNA, 80 bp, synthetic construct; identical to SEQ ID NO: 50589
  source 1..80: mol_type = other DNA

SEQ ID NO: 83772 - DNA, 80 bp, synthetic construct; identical to SEQ ID NO: 16501
  source 1..80: mol_type = other DNA

SEQ ID NO: 83773 - DNA, 80 bp, synthetic construct; identical to SEQ ID NO: 50591
  source 1..80: mol_type = other DNA

SEQ ID NO: 83774 - DNA, 80 bp, synthetic construct; identical to SEQ ID NO: 50592
  source 1..80: mol_type = other DNA

SEQ ID NO: 83775 - DNA, 80 bp, synthetic construct; identical to SEQ ID NO: 50593
  source 1..80: mol_type = other DNA

SEQ ID NO: 83776 - DNA, 80 bp, synthetic construct; identical to SEQ ID NO: 50594
  source 1..80: mol_type = other DNA

SEQ ID NO: 83777 - DNA, 80 bp, synthetic construct; identical to SEQ ID NO: 16502
  source 1..80: mol_type = other DNA

SEQ ID NO: 83778 - DNA, 80 bp, synthetic construct; identical to SEQ ID NO: 50596
  source 1..80: mol_type = other DNA

SEQ ID NO: 83779 - DNA, 80 bp, synthetic construct; identical to SEQ ID NO: 50597
  source 1..80: mol_type = other DNA

SEQ ID NO: 83780 - DNA, 80 bp, synthetic construct; identical to SEQ ID NO: 50598
  source 1..80: mol_type = other DNA

SEQ ID NO: 83781 - DNA, 80 bp, synthetic construct; identical to SEQ ID NO: 16503
  source 1..80: mol_type = other DNA

SEQ ID NO: 83782 - DNA, 80 bp, synthetic construct; identical to SEQ ID NO: 50600
  source 1..80: mol_type = other DNA

SEQ ID NO: 83783 - DNA, 80 bp, synthetic construct; identical to SEQ ID NO: 50601
  source 1..80: mol_type = other DNA

SEQ ID NO: 83784 - DNA, 80 bp, synthetic construct; identical to SEQ ID NO: 16504
  source 1..80: mol_type = other DNA

SEQ ID NO: 83785 - DNA, 80 bp, synthetic construct; identical to SEQ ID NO: 50604
  source 1..80: mol_type = other DNA

SEQ ID NO: 83786 - DNA, 80 bp, synthetic construct; identical to SEQ ID NO: 50605
  source 1..80: mol_type = other DNA

SEQ ID NO: 83787 - DNA, 80 bp, synthetic construct; identical to SEQ ID NO: 16505
  source 1..80: mol_type = other DNA

SEQ ID NO: 83788 - DNA, 80 bp, synthetic construct; identical to SEQ ID NO: 50608
  source 1..80: mol_type = other DNA

SEQ ID NO: 83789 - DNA, 80 bp, synthetic construct; identical to SEQ ID NO: 50609
  source 1..80: mol_type = other DNA

SEQ ID NO: 83790 - DNA, 80 bp, synthetic construct; identical to SEQ ID NO: 16506
  source 1..80: mol_type = other DNA

SEQ ID NO: 83791 - DNA, 80 bp, synthetic construct; identical to SEQ ID NO: 50612
  source 1..80: mol_type = other DNA

SEQ ID NO: 83792 - DNA, 80 bp, synthetic construct; identical to SEQ ID NO: 16507
  source 1..80: mol_type = other DNA

SEQ ID NO: 83793 - DNA, 80 bp, synthetic construct; identical to SEQ ID NO: 50615
  source 1..80: mol_type = other DNA

SEQ ID NO: 83794 - DNA, 80 bp, synthetic construct; identical to SEQ ID NO: 50616
  source 1..80: mol_type = other DNA

SEQ ID NO: 83795 - DNA, 80 bp, synthetic construct; identical to SEQ ID NO: 50617
  source 1..80: mol_type = other DNA

SEQ ID NO: 83796 - DNA, 80 bp, synthetic construct; identical to SEQ ID NO: 50618
  source 1..80: mol_type = other DNA

SEQ ID NO: 83797 - DNA, 80 bp, synthetic construct; identical to SEQ ID NO: 16508
  source 1..80: mol_type = other DNA

SEQ ID NO: 83798 - DNA, 80 bp, synthetic construct; identical to SEQ ID NO: 50620
  source 1..80: mol_type = other DNA

SEQ ID NO: 83799 - DNA, 80 bp, synthetic construct; identical to SEQ ID NO: 50621
  source 1..80: mol_type = other DNA

SEQ ID NO: 83800 - DNA, 80 bp, synthetic construct; identical to SEQ ID NO: 50622
  source 1..80: mol_type = other DNA

SEQ ID NO: 83801 - DNA, 80 bp, synthetic construct; identical to SEQ ID NO: 16509
  source 1..80: mol_type = other DNA

SEQ ID NO: 83802 - DNA, 80 bp, synthetic construct; identical to SEQ ID NO: 50624
  source 1..80: mol_type = other DNA

SEQ ID NO: 83803 - DNA, 80 bp, synthetic construct; identical to SEQ ID NO: 50625
  source 1..80: mol_type = other DNA

SEQ ID NO: 83804 - DNA, 80 bp, synthetic construct; identical to SEQ ID NO: 50626
  source 1..80: mol_type = other DNA

SEQ ID NO: 83805 - DNA, 80 bp, synthetic construct; identical to SEQ ID NO: 16510
  source 1..80: mol_type = other DNA

SEQ ID NO: 83806 - DNA, 80 bp, synthetic construct; identical to SEQ ID NO: 50629
  source 1..80: mol_type = other DNA

SEQ ID NO: 83807 - DNA, 80 bp, synthetic construct; identical to SEQ ID NO: 50630
  source 1..80: mol_type = other DNA

SEQ ID NO: 83808 - DNA, 80 bp, synthetic construct; identical to SEQ ID NO: 16511
  source 1..80: mol_type = other DNA

SEQ ID NO: 83809 - DNA, 80 bp, synthetic construct; identical to SEQ ID NO: 50632
  source 1..80: mol_type = other DNA

SEQ ID NO: 83810 - DNA, 80 bp, synthetic construct; identical to SEQ ID NO: 50633
  source 1..80: mol_type = other DNA

SEQ ID NO: 83811 - DNA, 80 bp, synthetic construct; identical to SEQ ID NO: 50634
  source 1..80: mol_type = other DNA

SEQ ID NO: 83812 - DNA, 80 bp, synthetic construct; identical to SEQ ID NO: 16512
  source 1..80: mol_type = other DNA

SEQ ID NO: 83813 - DNA, 80 bp, synthetic construct; identical to SEQ ID NO: 50636
  source 1..80: mol_type = other DNA

SEQ ID NO: 83814 - DNA, 80 bp, synthetic construct; identical to SEQ ID NO: 50637
  source 1..80: mol_type = other DNA

SEQ ID NO: 83815 - DNA, 80 bp, synthetic construct; identical to SEQ ID NO: 50638
  source 1..80: mol_type = other DNA

SEQ ID NO: 83816 - DNA, 80 bp, synthetic construct; identical to SEQ ID NO: 16513
  source 1..80: mol_type = other DNA

SEQ ID NO: 83817 - DNA, 80 bp, synthetic construct; identical to SEQ ID NO: 50640
  source 1..80: mol_type = other DNA

SEQ ID NO: 83818 - DNA, 80 bp, synthetic construct; identical to SEQ ID NO: 50642
  source 1..80: mol_type = other DNA

SEQ ID NO: 83819 - DNA, 80 bp, synthetic construct; identical to SEQ ID NO: 16514
  source 1..80: mol_type = other DNA

SEQ ID NO: 83820 - DNA, 80 bp, synthetic construct; identical to SEQ ID NO: 50644
  source 1..80: mol_type = other DNA

SEQ ID NO: 83821 - DNA, 80 bp, synthetic construct; identical to SEQ ID NO: 50645
  source 1..80: mol_type = other DNA

SEQ ID NO: 83822 - DNA, 80 bp, synthetic construct; identical to SEQ ID NO: 50646
  source 1..80: mol_type = other DNA

SEQ ID NO: 83823 - DNA, 80 bp, synthetic construct; identical to SEQ ID NO: 16515
  source 1..80: mol_type = other DNA

SEQ ID NO: 83824 - DNA, 80 bp, synthetic construct; identical to SEQ ID NO: 50648
  source 1..80: mol_type = other DNA

SEQ ID NO: 83825 - DNA, 80 bp, synthetic construct; identical to SEQ ID NO: 50649
  source 1..80: mol_type = other DNA

SEQ ID NO: 83826 - DNA, 80 bp, synthetic construct; identical to SEQ ID NO: 50650
  source 1..80: mol_type = other DNA

SEQ ID NO: 83827 - DNA, 80 bp, synthetic construct; identical to SEQ ID NO: 50651
  source 1..80: mol_type = other DNA

SEQ ID NO: 83828 - DNA, 80 bp, synthetic construct; identical to SEQ ID NO: 16516
  source 1..80: mol_type = other DNA

SEQ ID NO: 83829 - DNA, 80 bp, synthetic construct; identical to SEQ ID NO: 50653
  source 1..80: mol_type = other DNA

SEQ ID NO: 83830 - DNA, 80 bp, synthetic construct; identical to SEQ ID NO: 50654
  source 1..80: mol_type = other DNA

SEQ ID NO: 83831 - DNA, 80 bp, synthetic construct; identical to SEQ ID NO: 16517
  source 1..80: mol_type = other DNA

SEQ ID NO: 83832 - DNA, 80 bp, synthetic construct; identical to SEQ ID NO: 50656
  source 1..80: mol_type = other DNA

SEQ ID NO: 83833 - DNA, 80 bp, synthetic construct; identical to SEQ ID NO: 50657
  source 1..80: mol_type = other DNA

SEQ ID NO: 83834 - DNA, 80 bp, synthetic construct; identical to SEQ ID NO: 50658
  source 1..80: mol_type = other DNA

SEQ ID NO: 83835 - DNA, 80 bp, synthetic construct; identical to SEQ ID NO: 16518
  source 1..80: mol_type = other DNA

SEQ ID NO: 83836 - DNA, 80 bp, synthetic construct; identical to SEQ ID NO: 50660
  source 1..80: mol_type = other DNA

SEQ ID NO: 83837 - DNA, 80 bp, synthetic construct; identical to SEQ ID NO: 50661
  source 1..80: mol_type = other DNA

SEQ ID NO: 83838 - DNA, 80 bp, synthetic construct; identical to SEQ ID NO: 50662
  source 1..80: mol_type = other DNA

SEQ ID NO: 83839 - DNA, 80 bp, synthetic construct; identical to SEQ ID NO: 50663
  source 1..80: mol_type = other DNA

SEQ ID NO: 83840 - DNA, 80 bp, synthetic construct; identical to SEQ ID NO: 16519
  source 1..80: mol_type = other DNA

SEQ ID NO: 83841 - DNA, 80 bp, synthetic construct; identical to SEQ ID NO: 50665
  source 1..80: mol_type = other DNA

SEQ ID NO: 83842 - DNA, 80 bp, synthetic construct; identical to SEQ ID NO: 50666
  source 1..80: mol_type = other DNA

SEQ ID NO: 83843 - DNA, 80 bp, synthetic construct; identical to SEQ ID NO: 16520
  source 1..80: mol_type = other DNA

SEQ ID NO: 83844 - DNA, 80 bp, synthetic construct; identical to SEQ ID NO: 50668
  source 1..80: mol_type = other DNA

SEQ ID NO: 83845 - DNA, 80 bp, synthetic construct; identical to SEQ ID NO: 50669
  source 1..80: mol_type = other DNA

SEQ ID NO: 83846 - DNA, 80 bp, synthetic construct; identical to SEQ ID NO: 16521
  source 1..80: mol_type = other DNA

SEQ ID NO: 83847 - DNA, 80 bp, synthetic construct; identical to SEQ ID NO: 50671
  source 1..80: mol_type = other DNA

SEQ ID NO: 83848 - DNA, 80 bp, synthetic construct; identical to SEQ ID NO: 50672
  source 1..80: mol_type = other DNA

SEQ ID NO: 83849 - DNA, 80 bp, synthetic construct; identical to SEQ ID NO: 50673
  source 1..80: mol_type = other DNA

SEQ ID NO: 83850 - DNA, 80 bp, synthetic construct; identical to SEQ ID NO: 16522
  source 1..80: mol_type = other DNA

SEQ ID NO: 83851 - DNA, 80 bp, synthetic construct; identical to SEQ ID NO: 50675
  source 1..80: mol_type = other DNA

SEQ ID NO: 83852 - DNA, 80 bp, synthetic construct; identical to SEQ ID NO: 50676
  source 1..80: mol_type = other DNA

SEQ ID NO: 83853 - DNA, 80 bp, synthetic construct; identical to SEQ ID NO: 50677
  source 1..80: mol_type = other DNA

SEQ ID NO: 83854 - DNA, 80 bp, synthetic construct; identical to SEQ ID NO: 16523
  source 1..80: mol_type = other DNA

SEQ ID NO: 83855 - DNA, 80 bp, synthetic construct; identical to SEQ ID NO: 50679
  source 1..80: mol_type = other DNA

SEQ ID NO: 83856 - DNA, 80 bp, synthetic construct; identical to SEQ ID NO: 50680
  source 1..80: mol_type = other DNA

SEQ ID NO: 83857 - DNA, 80 bp, synthetic construct; identical to SEQ ID NO: 50681
  source 1..80: mol_type = other DNA

SEQ ID NO: 83858 - DNA, 80 bp, synthetic construct; identical to SEQ ID NO: 50682
  source 1..80: mol_type = other DNA

SEQ ID NO: 83859 - DNA, 80 bp, synthetic construct; identical to SEQ ID NO: 16524
  source 1..80: mol_type = other DNA

SEQ ID NO: 83860 - DNA, 80 bp, synthetic construct; identical to SEQ ID NO: 50684
  source 1..80: mol_type = other DNA

SEQ ID NO: 83861 - DNA, 80 bp, synthetic construct; identical to SEQ ID NO: 50685
  source 1..80: mol_type = other DNA

SEQ ID NO: 83862 - DNA, 80 bp, synthetic construct; identical to SEQ ID NO: 16525
  source 1..80: mol_type = other DNA

SEQ ID NO: 83863 - DNA, 80 bp, synthetic construct; identical to SEQ ID NO: 50687
  source 1..80: mol_type = other DNA

SEQ ID NO: 83864 - DNA, 80 bp, synthetic construct; identical to SEQ ID NO: 50688
  source 1..80: mol_type = other DNA

SEQ ID NO: 83865 - DNA, 80 bp, synthetic construct; identical to SEQ ID NO: 50689
  source 1..80: mol_type = other DNA

SEQ ID NO: 83866 - DNA, 80 bp, synthetic construct; identical to SEQ ID NO: 16526
  source 1..80: mol_type = other DNA

SEQ ID NO: 83867 - DNA, 80 bp, synthetic construct; identical to SEQ ID NO: 50691
  source 1..80: mol_type = other DNA

SEQ ID NO: 83868 - DNA, 80 bp, synthetic construct; identical to SEQ ID NO: 50692
  source 1..80: mol_type = other DNA

SEQ ID NO: 83869 - DNA, 80 bp, synthetic construct; identical to SEQ ID NO: 16527
  source 1..80: mol_type = other DNA

SEQ ID NO: 83870 - DNA, 80 bp, synthetic construct; identical to SEQ ID NO: 50694
  source 1..80: mol_type = other DNA

SEQ ID NO: 83871 - DNA, 80 bp, synthetic construct; identical to SEQ ID NO: 50695
  source 1..80: mol_type = other DNA

SEQ ID NO: 83872 - DNA, 80 bp, synthetic construct; identical to SEQ ID NO: 50696
  source 1..80: mol_type = other DNA

SEQ ID NO: 83873 - DNA, 80 bp, synthetic construct; identical to SEQ ID NO: 16528
  source 1..80: mol_type = other DNA

SEQ ID NO: 83874 - DNA, 80 bp, synthetic construct; identical to SEQ ID NO: 50698
  source 1..80: mol_type = other DNA

SEQ ID NO: 83875 - DNA, 80 bp, synthetic construct; identical to SEQ ID NO: 50699
  source 1..80: mol_type = other DNA

SEQ ID NO: 83876 - DNA, 80 bp, synthetic construct; identical to SEQ ID NO: 50700
  source 1..80: mol_type = other DNA

SEQ ID NO: 83877 - DNA, 80 bp, synthetic construct; identical to SEQ ID NO: 16529
  source 1..80: mol_type = other DNA

SEQ ID NO: 83878 - DNA, 80 bp, synthetic construct; identical to SEQ ID NO: 50702
  source 1..80: mol_type = other DNA

SEQ ID NO: 83879 - DNA, 80 bp, synthetic construct; identical to SEQ ID NO: 50703
  source 1..80: mol_type = other DNA

SEQ ID NO: 83880 - DNA, 80 bp, synthetic construct; identical to SEQ ID NO: 16530
  source 1..80: mol_type = other DNA

SEQ ID NO: 83881 - DNA, 80 bp, synthetic construct; identical to SEQ ID NO: 50706
  source 1..80: mol_type = other DNA

SEQ ID NO: 83882 - DNA, 80 bp, synthetic construct; identical to SEQ ID NO: 50707
  source 1..80: mol_type = other DNA

SEQ ID NO: 83883 - DNA, 80 bp, synthetic construct; identical to SEQ ID NO: 50708
  source 1..80: mol_type = other DNA

SEQ ID NO: 83884 - DNA, 80 bp, synthetic construct; identical to SEQ ID NO: 16531
  source 1..80: mol_type = other DNA

SEQ ID NO: 83885 - DNA, 80 bp, synthetic construct; identical to SEQ ID NO: 50712
  source 1..80: mol_type = other DNA

SEQ ID NO: 83886 - DNA, 80 bp, synthetic construct; identical to SEQ ID NO: 50714
  source 1..80: mol_type = other DNA

SEQ ID NO: 83887 - DNA, 80 bp, synthetic construct; identical to SEQ ID NO: 50716
  source 1..80: mol_type = other DNA

SEQ ID NO: 83888 - DNA, 80 bp, synthetic construct; identical to SEQ ID NO: 50718
  source 1..80: mol_type = other DNA

SEQ ID NO: 83889 - DNA, 80 bp, synthetic construct; identical to SEQ ID NO: 50720
  source 1..80: mol_type = other DNA

SEQ ID NO: 83890 - DNA, 80 bp, synthetic construct; identical to SEQ ID NO: 16534
  source 1..80: mol_type = other DNA

SEQ ID NO: 83891 - DNA, 80 bp, synthetic construct; identical to SEQ ID NO: 50723
  source 1..80: mol_type = other DNA

SEQ ID NO: 83892 - DNA, 80 bp, synthetic construct; identical to SEQ ID NO: 50724
  source 1..80: mol_type = other DNA

SEQ ID NO: 83893 - DNA, 80 bp, synthetic construct; identical to SEQ ID NO: 16535
  source 1..80: mol_type = other DNA

SEQ ID NO: 83894 - DNA, 80 bp, synthetic construct; identical to SEQ ID NO: 50726
  source 1..80: mol_type = other DNA

SEQ ID NO: 83895 - DNA, 80 bp, synthetic construct; identical to SEQ ID NO: 50727
  source 1..80: mol_type = other DNA

SEQ ID NO: 83896 - DNA, 80 bp, synthetic construct; identical to SEQ ID NO: 50728
  source 1..80: mol_type = other DNA

SEQ ID NO: 83897 - DNA, 80 bp, synthetic construct; identical to SEQ ID NO: 16536
  source 1..80: mol_type = other DNA

SEQ ID NO: 83898 - DNA, 80 bp, synthetic construct; identical to SEQ ID NO: 50730
  source 1..80: mol_type = other DNA

SEQ ID NO: 83899 - DNA, 80 bp, synthetic construct; identical to SEQ ID NO: 50731
  source 1..80: mol_type = other DNA

SEQ ID NO: 83900 - DNA, 80 bp, synthetic construct; identical to SEQ ID NO: 50732
  source 1..80: mol_type = other DNA

SEQ ID NO: 83901 - DNA, 80 bp, synthetic construct; identical to SEQ ID NO: 50733
  source 1..80: mol_type = other DNA

SEQ ID NO: 83902 - DNA, 80 bp, synthetic construct; identical to SEQ ID NO: 16537
  source 1..80: mol_type = other DNA

SEQ ID NO: 83903 - DNA, 80 bp, synthetic construct; identical to SEQ ID NO: 50735
  source 1..80: mol_type = other DNA

SEQ ID NO: 83904 - DNA, 80 bp, synthetic construct; identical to SEQ ID NO: 50736
  source 1..80: mol_type = other DNA

SEQ ID NO: 83905 - DNA, 80 bp, synthetic construct; identical to SEQ ID NO: 16538
  source 1..80: mol_type = other DNA

SEQ ID NO: 83906 - DNA, 80 bp, synthetic construct; identical to SEQ ID NO: 50739
  source 1..80: mol_type = other DNA

SEQ ID NO: 83907 - DNA, 80 bp, synthetic construct; identical to SEQ ID NO: 50740
  source 1..80: mol_type = other DNA

SEQ ID NO: 83908 - DNA, 80 bp, synthetic construct; identical to SEQ ID NO: 50741
  source 1..80: mol_type = other DNA

SEQ ID NO: 83909 - DNA, 80 bp, synthetic construct; identical to SEQ ID NO: 16539
  source 1..80: mol_type = other DNA

SEQ ID NO: 83910 - DNA, 80 bp, synthetic construct; identical to SEQ ID NO: 50743
  source 1..80: mol_type = other DNA

SEQ ID NO: 83911 - DNA, 80 bp, synthetic construct; identical to SEQ ID NO: 50744
  source 1..80: mol_type = other DNA

SEQ ID NO: 83912 - DNA, 80 bp, synthetic construct; identical to SEQ ID NO: 50745
  source 1..80: mol_type = other DNA

SEQ ID NO: 83913 - DNA, 80 bp, synthetic construct; identical to SEQ ID NO: 16540
  source 1..80: mol_type = other DNA

SEQ ID NO: 83914 - DNA, 80 bp, synthetic construct; identical to SEQ ID NO: 50747
  source 1..80: mol_type = other DNA

SEQ ID NO: 83915 - DNA, 80 bp, synthetic construct; identical to SEQ ID NO: 50749
  source 1..80: mol_type = other DNA

SEQ ID NO: 83916 - DNA, 80 bp, synthetic construct; identical to SEQ ID NO: 16541
  source 1..80: mol_type = other DNA

SEQ ID NO: 83917 - DNA, 80 bp, synthetic construct; identical to SEQ ID NO: 50751
  source 1..80: mol_type = other DNA

SEQ ID NO: 83918 - DNA, 80 bp, synthetic construct; identical to SEQ ID NO: 50752
  source 1..80: mol_type = other DNA

SEQ ID NO: 83919 - DNA, 80 bp, synthetic construct; identical to SEQ ID NO: 50753
  source 1..80: mol_type = other DNA

SEQ ID NO: 83920 - DNA, 80 bp, synthetic construct; identical to SEQ ID NO: 50754
  source 1..80: mol_type = other DNA

SEQ ID NO: 83921 - DNA, 80 bp, synthetic construct; identical to SEQ ID NO: 16542
  source 1..80: mol_type = other DNA

SEQ ID NO: 83922 - DNA, 80 bp, synthetic construct; identical to SEQ ID NO: 50756
  source 1..80: mol_type = other DNA

SEQ ID NO: 83923 - DNA, 80 bp, synthetic construct; identical to SEQ ID NO: 16587
  source 1..80: mol_type = other DNA

SEQ ID NO: 83924 - DNA, 80 bp, synthetic construct; identical to SEQ ID NO: 50758
  source 1..80: mol_type = other DNA

SEQ ID NO: 83925 - DNA, 80 bp, synthetic construct; identical to SEQ ID NO: 50759
  source 1..80: mol_type = other DNA

SEQ ID NO: 83926 - DNA, 80 bp, synthetic construct; identical to SEQ ID NO: 50760
  source 1..80: mol_type = other DNA

SEQ ID NO: 83927 - DNA, 80 bp, synthetic construct; identical to SEQ ID NO: 50761
  source 1..80: mol_type = other DNA

SEQ ID NO: 83928 - DNA, 80 bp, synthetic construct; identical to SEQ ID NO: 50762
  source 1..80: mol_type = other DNA

SEQ ID NO: 83929 - DNA, 80 bp, synthetic construct; identical to SEQ ID NO: 50763
  source 1..80: mol_type = other DNA

SEQ ID NO: 83930 - DNA, 80 bp, synthetic construct; identical to SEQ ID NO: 50764
  source 1..80: mol_type = other DNA

SEQ ID NO: 83931 - DNA, 80 bp, synthetic construct; identical to SEQ ID NO: 50765
  source 1..80: mol_type = other DNA

SEQ ID NO: 83932 - DNA, 80 bp, synthetic construct; identical to SEQ ID NO: 16589
  source 1..80: mol_type = other DNA

SEQ ID NO: 83933 - DNA, 80 bp, synthetic construct; identical to SEQ ID NO: 50767
  source 1..80: mol_type = other DNA

SEQ ID NO: 83934 - DNA, 80 bp, synthetic construct; identical to SEQ ID NO: 50768
  source 1..80: mol_type = other DNA

SEQ ID NO: 83935 - DNA, 80 bp, synthetic construct; identical to SEQ ID NO: 50769
  source 1..80: mol_type = other DNA

SEQ ID NO: 83936 - DNA, 80 bp, synthetic construct; identical to SEQ ID NO: 50770
  source 1..80: mol_type = other DNA

SEQ ID NO: 83937 - DNA, 80 bp, synthetic construct; identical to SEQ ID NO: 16590
  source 1..80: mol_type = other DNA

SEQ ID NO: 83938 - DNA, 80 bp, synthetic construct; identical to SEQ ID NO: 50772
  source 1..80: mol_type = other DNA

SEQ ID NO: 83939 - DNA, 80 bp, synthetic construct; identical to SEQ ID NO: 50773
  source 1..80: mol_type = other DNA

SEQ ID NO: 83940 - DNA, 80 bp, synthetic construct; identical to SEQ ID NO: 50774
  source 1..80: mol_type = other DNA

SEQ ID NO: 83941 - DNA, 80 bp, synthetic construct; identical to SEQ ID NO: 50775
  source 1..80: mol_type = other DNA

SEQ ID NO: 83942 - DNA, 80 bp, synthetic construct; identical to SEQ ID NO: 50776
  source 1..80: mol_type = other DNA

SEQ ID NO: 83943 - DNA, 80 bp, synthetic construct; identical to SEQ ID NO: 50777
  source 1..80: mol_type = other DNA

SEQ ID NO: 83944 - DNA, 80 bp, synthetic construct; identical to SEQ ID NO: 50778
  source 1..80: mol_type = other DNA

SEQ ID NO: 83945 - DNA, 80 bp, synthetic construct; identical to SEQ ID NO: 50779
  source 1..80: mol_type = other DNA

SEQ ID NO: 83946 - DNA, 80 bp, synthetic construct; identical to SEQ ID NO: 16592
  source 1..80: mol_type = other DNA

SEQ ID NO: 83947 - DNA, 80 bp, synthetic construct; identical to SEQ ID NO: 50781
  source 1..80: mol_type = other DNA

SEQ ID NO: 83948 - DNA, 80 bp, synthetic construct; identical to SEQ ID NO: 50782
  source 1..80: mol_type = other DNA

SEQ ID NO: 83949 - DNA, 80 bp, synthetic construct; identical to SEQ ID NO: 50783
  source 1..80: mol_type = other DNA

SEQ ID NO: 83950 - DNA, 80 bp, synthetic construct; identical to SEQ ID NO: 50784
  source 1..80: mol_type = other DNA

SEQ ID NO: 83951 - DNA, 80 bp, synthetic construct; identical to SEQ ID NO: 50785
  source 1..80: mol_type = other DNA

SEQ ID NO: 83952 - DNA, 80 bp, synthetic construct; identical to SEQ ID NO: 50786
  source 1..80: mol_type = other DNA

SEQ ID NO: 83953 - DNA, 80 bp, synthetic construct; identical to SEQ ID NO: 50787
  source 1..80: mol_type = other DNA

SEQ ID NO: 83954 - DNA, 80 bp, synthetic construct; identical to SEQ ID NO: 50788
  source 1..80: mol_type = other DNA

SEQ ID NO: 83955 - DNA, 80 bp, synthetic construct; identical to SEQ ID NO: 50789
  source 1..80: mol_type = other DNA

SEQ ID NO: 83956 - DNA, 80 bp, synthetic construct; identical to SEQ ID NO: 50790
  source 1..80: mol_type = other DNA

SEQ ID NO: 83957 - DNA, 80 bp, synthetic construct; identical to SEQ ID NO: 50791
  source 1..80: mol_type = other DNA

SEQ ID NO: 83958 - DNA, 80 bp, synthetic construct; identical to SEQ ID NO: 50793
  source 1..80: mol_type = other DNA

SEQ ID NO: 83959 - DNA, 80 bp, synthetic construct; identical to SEQ ID NO: 50794
  source 1..80: mol_type = other DNA

SEQ ID NO: 83960 - DNA, 80 bp, synthetic construct; identical to SEQ ID NO: 50795
  source 1..80: mol_type = other DNA

SEQ ID NO: 83961 - DNA, 80 bp, synthetic construct; identical to SEQ ID NO: 50796
  source 1..80: mol_type = other DNA

SEQ ID NO: 83962 - DNA, 80 bp, synthetic construct; identical to SEQ ID NO: 50797
  source 1..80: mol_type = other DNA

SEQ ID NO: 83963 - DNA, 80 bp, synthetic construct; identical to SEQ ID NO: 50798
  source 1..80: mol_type = other DNA

SEQ ID NO: 83964 - DNA, 80 bp, synthetic construct; identical to SEQ ID NO: 16596
  source 1..80: mol_type = other DNA

SEQ ID NO: 83965 - DNA, 80 bp, synthetic construct; identical to SEQ ID NO: 50800
  source 1..80: mol_type = other DNA

SEQ ID NO: 83966 - DNA, 80 bp, synthetic construct; identical to SEQ ID NO: 50801
  source 1..80: mol_type = other DNA

SEQ ID NO: 83967 - DNA, 80 bp, synthetic construct; identical to SEQ ID NO: 50802
  source 1..80: mol_type = other DNA

SEQ ID NO: 83968 - DNA, 80 bp, synthetic construct; identical to SEQ ID NO: 16597
  source 1..80: mol_type = other DNA

SEQ ID NO: 83969 - DNA, 80 bp, synthetic construct; identical to SEQ ID NO: 50804
  source 1..80: mol_type = other DNA

SEQ ID NO: 83970 - DNA, 80 bp, synthetic construct; identical to SEQ ID NO: 50805
  source 1..80: mol_type = other DNA

SEQ ID NO: 83971 - DNA, 80 bp, synthetic construct; identical to SEQ ID NO: 50806
  source 1..80: mol_type = other DNA

SEQ ID NO: 83972 - DNA, 80 bp, synthetic construct; identical to SEQ ID NO: 16598
  source 1..80: mol_type = other DNA

SEQ ID NO: 83973 - DNA, 80 bp, synthetic construct; identical to SEQ ID NO: 50808
  source 1..80: mol_type = other DNA

SEQ ID NO: 83974 - DNA, 80 bp, synthetic construct; identical to SEQ ID NO: 50809
  source 1..80: mol_type = other DNA

SEQ ID NO: 83975 - DNA, 80 bp, synthetic construct; identical to SEQ ID NO: 50810
  source 1..80: mol_type = other DNA

SEQ ID NO: 83976 - DNA, 80 bp, synthetic construct; identical to SEQ ID NO: 50811
  source 1..80: mol_type = other DNA

SEQ ID NO: 83977 - DNA, 80 bp, synthetic construct; identical to SEQ ID NO: 50812
  source 1..80: mol_type = other DNA

SEQ ID NO: 83978 - DNA, 80 bp, synthetic construct; identical to SEQ ID NO: 16543
  source 1..80: mol_type = other DNA

SEQ ID NO: 83979 - DNA, 80 bp, synthetic construct; identical to SEQ ID NO: 50814
  source 1..80: mol_type = other DNA

SEQ ID NO: 83980 - DNA, 80 bp, synthetic construct; identical to SEQ ID NO: 50815
  source 1..80: mol_type = other DNA

SEQ ID NO: 83981 - DNA, 80 bp, synthetic construct; identical to SEQ ID NO: 50816
  source 1..80: mol_type = other DNA

SEQ ID NO: 83982 - DNA, 80 bp, synthetic construct; identical to SEQ ID NO: 50817
  source 1..80: mol_type = other DNA

SEQ ID NO: 83983 - DNA, 80 bp, synthetic construct; identical to SEQ ID NO: 50818
  source 1..80: mol_type = other DNA

SEQ ID NO: 83984 - DNA, 80 bp, synthetic construct; identical to SEQ ID NO: 16544
  source 1..80: mol_type = other DNA

SEQ ID NO: 83985 - DNA, 80 bp, synthetic construct; identical to SEQ ID NO: 50820
  source 1..80: mol_type = other DNA

SEQ ID NO: 83986 - DNA, 80 bp, synthetic construct; identical to SEQ ID NO: 50821
  source 1..80: mol_type = other DNA

SEQ ID NO: 83987 - DNA, 80 bp, synthetic construct; identical to SEQ ID NO: 16545
  source 1..80: mol_type = other DNA

SEQ ID NO: 83988 - DNA, 80 bp, synthetic construct; identical to SEQ ID NO: 50823
  source 1..80: mol_type = other DNA

SEQ ID NO: 83989 - DNA, 80 bp, synthetic construct; identical to SEQ ID NO: 50824
  source 1..80: mol_type = other DNA

SEQ ID NO: 83990 - DNA, 80 bp, synthetic construct; identical to SEQ ID NO: 50825
  source 1..80: mol_type = other DNA

SEQ ID NO: 83991 - DNA, 80 bp, synthetic construct; identical to SEQ ID NO: 50826
  source 1..80: mol_type = other DNA

SEQ ID NO: 83992 - DNA, 80 bp, synthetic construct; identical to SEQ ID NO: 16546
  source 1..80: mol_type = other DNA

SEQ ID NO: 83993 - DNA, 80 bp, synthetic construct; identical to SEQ ID NO: 50828
  source 1..80: mol_type = other DNA

SEQ ID NO: 83994 - DNA, 80 bp, synthetic construct; identical to SEQ ID NO: 50829
  source 1..80: mol_type = other DNA

SEQ ID NO: 83995 - DNA, 80 bp, synthetic construct; identical to SEQ ID NO: 16547
  source 1..80: mol_type = other DNA

SEQ ID NO: 83996 - DNA, 80 bp, synthetic construct; identical to SEQ ID NO: 50831
  source 1..80: mol_type = other DNA

SEQ ID NO: 83997 - DNA, 80 bp, synthetic construct; identical to SEQ ID NO: 50832
  source 1..80: mol_type = other DNA

SEQ ID NO: 83998 - DNA, 80 bp, synthetic construct; identical to SEQ ID NO: 16548
  source 1..80: mol_type = other DNA

SEQ ID NO: 83999 - DNA, 80 bp, synthetic construct; identical to SEQ ID NO: 50836
  source 1..80: mol_type = other DNA

SEQ ID NO: 84000 - DNA, 80 bp, synthetic construct; identical to SEQ ID NO: 16549
  source 1..80: mol_type = other DNA

SEQ ID NO: 84001 - DNA, 80 bp, synthetic construct; identical to SEQ ID NO: 50840
  source 1..80: mol_type = other DNA

SEQ ID NO: 84002 - DNA, 80 bp, synthetic construct; identical to SEQ ID NO: 50841
  source 1..80: mol_type = other DNA

SEQ ID NO: 84003 - DNA, 80 bp, synthetic construct; identical to SEQ ID NO: 16550
  source 1..80: mol_type = other DNA

SEQ ID NO: 84004 - DNA, 80 bp, synthetic construct; identical to SEQ ID NO: 50843
  source 1..80: mol_type = other DNA

SEQ ID NO: 84005 - DNA, 80 bp, synthetic construct; identical to SEQ ID NO: 50844
  source 1..80: mol_type = other DNA

SEQ ID NO: 84006 - DNA, 80 bp, synthetic construct; identical to SEQ ID NO: 50845
  source 1..80: mol_type = other DNA

SEQ ID NO: 84007 - DNA, 80 bp, synthetic construct; identical to SEQ ID NO: 50846
  source 1..80: mol_type = other DNA

SEQ ID NO: 84008 - DNA, 80 bp, synthetic construct; identical to SEQ ID NO: 16551
  source 1..80: mol_type = other DNA

SEQ ID NO: 84009 - DNA, 80 bp, synthetic construct; identical to SEQ ID NO: 50848
  source 1..80: mol_type = other DNA

SEQ ID NO: 84010 - DNA, 80 bp, synthetic construct; identical to SEQ ID NO: 50849
  source 1..80: mol_type = other DNA

SEQ ID NO: 84011 - DNA, 80 bp, synthetic construct; identical to SEQ ID NO: 16552
  source 1..80: mol_type = other DNA

SEQ ID NO: 84012 - DNA, 80 bp, synthetic construct; identical to SEQ ID NO: 50851
  source 1..80: mol_type = other DNA

SEQ ID NO: 84013 - DNA, 80 bp, synthetic construct; identical to SEQ ID NO: 50852
  source 1..80: mol_type = other DNA

SEQ ID NO: 84014 - DNA, 80 bp, synthetic construct; identical to SEQ ID NO: 50853
  source 1..80: mol_type = other DNA

SEQ ID NO: 84015 - DNA, 80 bp, synthetic construct; identical to SEQ ID NO: 50854
  source 1..80: mol_type = other DNA

SEQ ID NO: 84016 - DNA, 80 bp, synthetic construct; identical to SEQ ID NO: 16553
  source 1..80: mol_type = other DNA

SEQ ID NO: 84017 - DNA, 80 bp, synthetic construct; identical to SEQ ID NO: 50856
  source 1..80: mol_type = other DNA

SEQ ID NO: 84018 - DNA, 80 bp, synthetic construct; identical to SEQ ID NO: 50857
  source 1..80: mol_type = other DNA

SEQ ID NO: 84019 - DNA, 80 bp, synthetic construct; identical to SEQ ID NO: 50858
  source 1..80: mol_type = other DNA

SEQ ID NO: 84020 - DNA, 80 bp, synthetic construct; identical to SEQ ID NO: 16554
  source 1..80: mol_type = other DNA

SEQ ID NO: 84021 - DNA, 80 bp, synthetic construct; identical to SEQ ID NO: 50860
  source 1..80: mol_type = other DNA

SEQ ID NO: 84022 - DNA, 80 bp, synthetic construct; identical to SEQ ID NO: 50861
  source 1..80: mol_type = other DNA

SEQ ID NO: 84023 - DNA, 80 bp, synthetic construct; identical to SEQ ID NO: 16555
  source 1..80: mol_type = other DNA

SEQ ID NO: 84024 - DNA, 80 bp, synthetic construct; identical to SEQ ID NO: 50863
  source 1..80: mol_type = other DNA

SEQ ID NO: 84025 - DNA, 80 bp, synthetic construct; identical to SEQ ID NO: 50864
  source 1..80: mol_type = other DNA

SEQ ID NO: 84026 - DNA, 80 bp, synthetic construct; identical to SEQ ID NO: 50865
  source 1..80: mol_type = other DNA

SEQ ID NO: 84027 - DNA, 80 bp, synthetic construct; identical to SEQ ID NO: 16556
  source 1..80: mol_type = other DNA

SEQ ID NO: 84028 - DNA, 80 bp, synthetic construct; identical to SEQ ID NO: 50867
  source 1..80: mol_type = other DNA

SEQ ID NO: 84029 - DNA, 80 bp, synthetic construct; identical to SEQ ID NO: 50869
  source 1..80: mol_type = other DNA

SEQ ID NO: 84030 - DNA, 80 bp, synthetic construct; identical to SEQ ID NO: 16557
  source 1..80: mol_type = other DNA

SEQ ID NO: 84031 - DNA, 80 bp, synthetic construct; identical to SEQ ID NO: 50872
  source 1..80: mol_type = other DNA

SEQ ID NO: 84032 - DNA, 80 bp, synthetic construct; identical to SEQ ID NO: 50874
  source 1..80: mol_type = other DNA

SEQ ID NO: 84033 - DNA, 80 bp, synthetic construct; identical to SEQ ID NO: 50876
  source 1..80: mol_type = other DNA

SEQ ID NO: 84034 - DNA, 80 bp, synthetic construct; identical to SEQ ID NO: 50878
  source 1..80: mol_type = other DNA

SEQ ID NO: 84035 - DNA, 80 bp, synthetic construct; identical to SEQ ID NO: 16559
  source 1..80: mol_type = other DNA

SEQ ID NO: 84036 - DNA, 80 bp, synthetic construct; identical to SEQ ID NO: 50881
  source 1..80: mol_type = other DNA

SEQ ID NO: 84037 - DNA, 80 bp, synthetic construct; identical to SEQ ID NO: 50883
  source 1..80: mol_type = other DNA

SEQ ID NO: 84038 - DNA, 80 bp, synthetic construct; identical to SEQ ID NO: 50885
  source 1..80: mol_type = other DNA

SEQ ID NO: 84039 - DNA, 80 bp, synthetic construct; identical to SEQ ID NO: 16561
  source 1..80: mol_type = other DNA

SEQ ID NO: 84040 - DNA, 80 bp, synthetic construct; identical to SEQ ID NO: 50888
  source 1..80: mol_type = other DNA

SEQ ID NO: 84041 - DNA, 80 bp, synthetic construct; identical to SEQ ID NO: 50889
  source 1..80: mol_type = other DNA

SEQ ID NO: 84042 - DNA, 80 bp, synthetic construct; identical to SEQ ID NO: 16562
  source 1..80: mol_type = other DNA

SEQ ID NO: 84043 - DNA, 80 bp, synthetic construct; identical to SEQ ID NO: 50892
  source 1..80: mol_type = other DNA

SEQ ID NO: 84044 - DNA, 80 bp, synthetic construct; identical to SEQ ID NO: 50893
  source 1..80: mol_type = other DNA

SEQ ID NO: 84045 - DNA, 80 bp, synthetic construct; identical to SEQ ID NO: 50894
  source 1..80: mol_type = other DNA

SEQ ID NO: 84046 - DNA, 80 bp, synthetic construct; identical to SEQ ID NO: 16563
  source 1..80: mol_type = other DNA

SEQ ID NO: 84047 - DNA, 80 bp, synthetic construct; identical to SEQ ID NO: 16576
  source 1..80: mol_type = other DNA

SEQ ID NO: 84048 - DNA, 80 bp, synthetic construct; identical to SEQ ID NO: 50898
  source 1..80: mol_type = other DNA

SEQ ID NO: 84049 - DNA, 80 bp, synthetic construct; identical to SEQ ID NO: 50900
  source 1..80: mol_type = other DNA

SEQ ID NO: 84050 - DNA, 80 bp, synthetic construct; identical to SEQ ID NO: 50901
  source 1..80: mol_type = other DNA

SEQ ID NO: 84051 - DNA, 80 bp, synthetic construct; identical to SEQ ID NO: 50902
  source 1..80: mol_type = other DNA

SEQ ID NO: 84052 - DNA, 80 bp, synthetic construct; identical to SEQ ID NO: 16565
  source 1..80: mol_type = other DNA

SEQ ID NO: 84053 - DNA, 80 bp, synthetic construct; identical to SEQ ID NO: 50904
  source 1..80: mol_type = other DNA

SEQ ID NO: 84054 - DNA, 80 bp, synthetic construct; identical to SEQ ID NO: 50905
  source 1..80: mol_type = other DNA

SEQ ID NO: 84055 - DNA, 80 bp, synthetic construct; identical to SEQ ID NO: 50906
  source 1..80: mol_type = other DNA

SEQ ID NO: 84056 - DNA, 80 bp, synthetic construct; identical to SEQ ID NO: 16566
  source 1..80: mol_type = other DNA

SEQ ID NO: 84057 - DNA, 80 bp, synthetic construct; identical to SEQ ID NO: 50908
  source 1..80: mol_type = other DNA

SEQ ID NO: 84058 - DNA, 80 bp, synthetic construct; identical to SEQ ID NO: 50909
  source 1..80: mol_type = other DNA

SEQ ID NO: 84059 - DNA, 80 bp, synthetic construct; identical to SEQ ID NO: 16567
  source 1..80: mol_type = other DNA

SEQ ID NO: 84060 - DNA, 80 bp, synthetic construct; identical to SEQ ID NO: 50911
  source 1..80: mol_type = other DNA

SEQ ID NO: 84061 - DNA, 80 bp, synthetic construct; identical to SEQ ID NO: 50912
  source 1..80: mol_type = other DNA

SEQ ID NO: 84062 - DNA, 80 bp, synthetic construct; identical to SEQ ID NO: 50913
  source 1..80: mol_type = other DNA

SEQ ID NO: 84063 - DNA, 80 bp, synthetic construct; identical to SEQ ID NO: 50914
  source 1..80: mol_type = other DNA

SEQ ID NO: 84064 - DNA, 80 bp, synthetic construct; identical to SEQ ID NO: 16568
  source 1..80: mol_type = other DNA

SEQ ID NO: 84065 - DNA, 80 bp, synthetic construct; identical to SEQ ID NO: 50916
  source 1..80: mol_type = other DNA

SEQ ID NO: 84066 - DNA, 80 bp, synthetic construct; identical to SEQ ID NO: 50917
  source 1..80: mol_type = other DNA

SEQ ID NO: 84067 - DNA, 80 bp, synthetic construct; identical to SEQ ID NO: 50918
  source 1..80: mol_type = other DNA

SEQ ID NO: 84068 - DNA, 80 bp, synthetic construct; identical to SEQ ID NO: 16569
  source 1..80: mol_type = other DNA

SEQ ID NO: 84069 - DNA, 80 bp, synthetic construct; identical to SEQ ID NO: 50920
  source 1..80: mol_type = other DNA

SEQ ID NO: 84070 - DNA, 80 bp, synthetic construct; identical to SEQ ID NO: 50921
  source 1..80: mol_type = other DNA

SEQ ID NO: 84071 - DNA, 80 bp, synthetic construct; identical to SEQ ID NO: 50922
  source 1..80: mol_type = other DNA

SEQ ID NO: 84072 - DNA, 80 bp, synthetic construct; identical to SEQ ID NO: 50923
  source 1..80: mol_type = other DNA

SEQ ID NO: 84073 - DNA, 80 bp, synthetic construct; identical to SEQ ID NO: 50924
  source 1..80: mol_type = other DNA

SEQ ID NO: 84074 - DNA, 80 bp, synthetic construct; identical to SEQ ID NO: 50925
  source 1..80: mol_type = other DNA

SEQ ID NO: 84075 - DNA, 80 bp, synthetic construct; identical to SEQ ID NO: 50926
  source 1..80: mol_type = other DNA

SEQ ID NO: 84076 - DNA, 80 bp, synthetic construct; identical to SEQ ID NO: 50927
  source 1..80: mol_type = other DNA

SEQ ID NO: 84077 - DNA, 80 bp, synthetic construct; identical to SEQ ID NO: 16571
  source 1..80: mol_type = other DNA

SEQ ID NO: 84078 - DNA, 80 bp, synthetic construct; identical to SEQ ID NO: 50929
  source 1..80: mol_type = other DNA

SEQ ID NO: 84079 - DNA, 80 bp, synthetic construct; identical to SEQ ID NO: 50930
  source 1..80: mol_type = other DNA

SEQ ID NO: 84080 - DNA, 80 bp, synthetic construct; identical to SEQ ID NO: 50931
  source 1..80: mol_type = other DNA

SEQ ID NO: 84081 - DNA, 80 bp, synthetic construct; identical to SEQ ID NO: 50932
  source 1..80: mol_type = other DNA

SEQ ID NO: 84082 - DNA, 80 bp, synthetic construct; identical to SEQ ID NO: 50933
  source 1..80: mol_type = other DNA

SEQ ID NO: 84083 - DNA, 80 bp, synthetic construct; identical to SEQ ID NO: 50934
  source 1..80: mol_type = other DNA

SEQ ID NO: 84084 - DNA, 80 bp, synthetic construct; identical to SEQ ID NO: 16573
  source 1..80: mol_type = other DNA

SEQ ID NO: 84085 - DNA, 80 bp, synthetic construct; identical to SEQ ID NO: 50936
  source 1..80: mol_type = other DNA

SEQ ID NO: 84086 - DNA, 80 bp, synthetic construct; identical to SEQ ID NO: 50937
  source 1..80: mol_type = other DNA

SEQ ID NO: 84087 - DNA, 80 bp, synthetic construct; identical to SEQ ID NO: 50938
  source 1..80: mol_type = other DNA

SEQ ID NO: 84088 - DNA, 80 bp, synthetic construct; identical to SEQ ID NO: 16574
  source 1..80: mol_type = other DNA

SEQ ID NO: 84089 - DNA, 80 bp, synthetic construct; identical to SEQ ID NO: 50940
  source 1..80: mol_type = other DNA

SEQ ID NO: 84090 - DNA, 80 bp, synthetic construct; identical to SEQ ID NO: 50941
  source 1..80: mol_type = other DNA

SEQ ID NO: 84091 - DNA, 80 bp, synthetic construct; identical to SEQ ID NO: 50942
  source 1..80: mol_type = other DNA

SEQ ID NO: 84092 - DNA, 80 bp, synthetic construct; identical to SEQ ID NO: 16575
  source 1..80: mol_type = other DNA

SEQ ID NO: 84093 - DNA, 80 bp, synthetic construct; identical to SEQ ID NO: 50944
  source 1..80: mol_type = other DNA

SEQ ID NO: 84094 - DNA, 80 bp, synthetic construct; identical to SEQ ID NO: 50945
  source 1..80: mol_type = other DNA

SEQ ID NO: 84095 - DNA, 80 bp, synthetic construct; identical to SEQ ID NO: 50946
  source 1..80: mol_type = other DNA

SEQ ID NO: 84096 - DNA, 80 bp, synthetic construct; identical to SEQ ID NO: 50947
  source 1..80: mol_type = other DNA

SEQ ID NO: 84097 - DNA, 80 bp, synthetic construct; identical to SEQ ID NO: 50949
  source 1..80: mol_type = other DNA

SEQ ID NO: 84098 - DNA, 80 bp, synthetic construct; identical to SEQ ID NO: 50950
  source 1..80: mol_type = other DNA

SEQ ID NO: 84099 - DNA, 80 bp, synthetic construct; identical to SEQ ID NO: 16577
  source 1..80: mol_type = other DNA

SEQ ID NO: 84100 - DNA, 80 bp, synthetic construct; identical to SEQ ID NO: 50952
  source 1..80: mol_type = other DNA

SEQ ID NO: 84101 - DNA, 80 bp, synthetic construct; identical to SEQ ID NO: 16578
  source 1..80: mol_type = other DNA

SEQ ID NO: 84102 - DNA, 80 bp, synthetic construct; identical to SEQ ID NO: 50955
  source 1..80: mol_type = other DNA

SEQ ID NO: 84103 - DNA, 80 bp, synthetic construct; identical to SEQ ID NO: 50956
  source 1..80: mol_type = other DNA

SEQ ID NO: 84104 - DNA, 80 bp, synthetic construct; identical to SEQ ID NO: 50957
  source 1..80: mol_type = other DNA

SEQ ID NO: 84105 - DNA, 80 bp, synthetic construct; identical to SEQ ID NO: 50958
  source 1..80: mol_type = other DNA

SEQ ID NO: 84106 - DNA, 80 bp, synthetic construct; identical to SEQ ID NO: 16579
  source 1..80: mol_type = other DNA

SEQ ID NO: 84107 - DNA, 80 bp, synthetic construct; identical to SEQ ID NO: 50960
  source 1..80: mol_type = other DNA

SEQ ID NO: 84108 - DNA, 80 bp, synthetic construct; identical to SEQ ID NO: 50961
  source 1..80: mol_type = other DNA

SEQ ID NO: 84109 - DNA, 80 bp, synthetic construct; identical to SEQ ID NO: 50962
  source 1..80: mol_type = other DNA

SEQ ID NO: 84110 - DNA, 80 bp, synthetic construct; identical to SEQ ID NO: 50963
  source 1..80: mol_type = other DNA

SEQ ID NO: 84111 - DNA, 80 bp, synthetic construct; identical to SEQ ID NO: 16580
  source 1..80: mol_type = other DNA

SEQ ID NO: 84112 - DNA, 80 bp, synthetic construct; identical to SEQ ID NO: 50965
  source 1..80: mol_type = other DNA

SEQ ID NO: 84113 - DNA, 80 bp, synthetic construct; identical to SEQ ID NO: 50966
  source 1..80: mol_type = other DNA

SEQ ID NO: 84114 - DNA, 80 bp, synthetic construct; identical to SEQ ID NO: 50967
  source 1..80: mol_type = other DNA

SEQ ID NO: 84115 - DNA, 80 bp, synthetic construct; identical to SEQ ID NO: 50968
  source 1..80: mol_type = other DNA

SEQ ID NO: 84116 - DNA, 80 bp, synthetic construct; identical to SEQ ID NO: 50969
  source 1..80: mol_type = other DNA

SEQ ID NO: 84117 - DNA, 80 bp, synthetic construct; identical to SEQ ID NO: 50970
  source 1..80: mol_type = other DNA

SEQ ID NO: 84118 - DNA, 80 bp, synthetic construct; identical to SEQ ID NO: 50971
  source 1..80: mol_type = other DNA

SEQ ID NO: 84119 - DNA, 80 bp, synthetic construct; identical to SEQ ID NO: 16570
  source 1..80: mol_type = other DNA

SEQ ID NO: 84120 - DNA, 80 bp, synthetic construct; identical to SEQ ID NO: 50973
  source 1..80: mol_type = other DNA

SEQ ID NO: 84121 - DNA, 80 bp, synthetic construct; identical to SEQ ID NO: 50974
  source 1..80: mol_type = other DNA

SEQ ID NO: 84122 - DNA, 80 bp, synthetic construct; identical to SEQ ID NO: 50975
  source 1..80: mol_type = other DNA

SEQ ID NO: 84123 - DNA, 80 bp, synthetic construct; identical to SEQ ID NO: 16583
  source 1..80: mol_type = other DNA

SEQ ID NO: 84124 - DNA, 80 bp, synthetic construct; identical to SEQ ID NO: 50977
  source 1..80: mol_type = other DNA

SEQ ID NO: 84125 - DNA, 80 bp, synthetic construct; identical to SEQ ID NO: 50978
  source 1..80: mol_type = other DNA

SEQ ID NO: 84126 - DNA, 80 bp, synthetic construct; identical to SEQ ID NO: 16572
  source 1..80: mol_type = other DNA

SEQ ID NO: 84127 - DNA, 80 bp, synthetic construct; identical to SEQ ID NO: 50980
  source 1..80: mol_type = other DNA

SEQ ID NO: 84128 - DNA, 80 bp, synthetic construct; identical to SEQ ID NO: 50981
  source 1..80: mol_type = other DNA

SEQ ID NO: 84129 - DNA, 80 bp, synthetic construct; identical to SEQ ID NO: 50982
  source 1..80: mol_type = other DNA

SEQ ID NO: 84130 - DNA, 80 bp, synthetic construct; identical to SEQ ID NO: 50983
  source 1..80: mol_type = other DNA

SEQ ID NO: 84131 - DNA, 80 bp, synthetic construct; identical to SEQ ID NO: 16585
  source 1..80: mol_type = other DNA

SEQ ID NO: 84132 - DNA, 80 bp, synthetic construct; identical to SEQ ID NO: 50985
  source 1..80: mol_type = other DNA

SEQ ID NO: 84133 - DNA, 80 bp, synthetic construct; identical to SEQ ID NO: 50986
  source 1..80: mol_type = other DNA

SEQ ID NO: 84134 - DNA, 80 bp, synthetic construct; identical to SEQ ID NO: 50987
  source 1..80: mol_type = other DNA

SEQ ID NO: 84135 - DNA, 80 bp, synthetic construct; identical to SEQ ID NO: 16586
  source 1..80: mol_type = other DNA

SEQ ID NO: 84136 - DNA, 80 bp, synthetic construct; identical to SEQ ID NO: 50989
  source 1..80: mol_type = other DNA

SEQ ID NO: 84137 - DNA, 80 bp, synthetic construct; identical to SEQ ID NO: 50990
  source 1..80: mol_type = other DNA

SEQ ID NO: 84138 - DNA, 80 bp, synthetic construct; identical to SEQ ID NO: 50991
  source 1..80: mol_type = other DNA

SEQ ID NO: 84139 - DNA, 80 bp, synthetic construct; identical to SEQ ID NO: 50992
  source 1..80: mol_type = other DNA

SEQ ID NO: 84140 - DNA, 80 bp, synthetic construct; identical to SEQ ID NO: 50993
  source 1..80: mol_type = other DNA

SEQ ID NO: 84141 - DNA, 80 bp, synthetic construct; identical to SEQ ID NO: 50994
  source 1..80: mol_type = other DNA

SEQ ID NO: 84142 - DNA, 80 bp, synthetic construct; identical to SEQ ID NO: 50995
  source 1..80: mol_type = other DNA

SEQ ID NO: 84143 - DNA, 80 bp, synthetic construct; identical to SEQ ID NO: 50996
  source 1..80: mol_type = other DNA

SEQ ID NO: 84144 - DNA, 80 bp, synthetic construct; identical to SEQ ID NO: 50997
  source 1..80: mol_type = other DNA

SEQ ID NO: 84145 - DNA, 80 bp, synthetic construct; identical to SEQ ID NO: 16588
  source 1..80: mol_type = other DNA

SEQ ID NO: 84146 - DNA, 80 bp, synthetic construct; identical to SEQ ID NO: 50999
  source 1..80: mol_type = other DNA

SEQ ID NO: 84147 - DNA, 80 bp, synthetic construct; identical to SEQ ID NO: 51000
  source 1..80: mol_type = other DNA

SEQ ID NO: 84148 - DNA, 80 bp, synthetic construct; identical to SEQ ID NO: 51001
  source 1..80: mol_type = other DNA

SEQ ID NO: 84149 - DNA, 80 bp, synthetic construct; identical to SEQ ID NO: 51002
  source 1..80: mol_type = other DNA

SEQ ID NO: 84150 - DNA, 80 bp, synthetic construct; identical to SEQ ID NO: 51003
  source 1..80: mol_type = other DNA

SEQ ID NO: 84151 - DNA, 80 bp, synthetic construct; identical to SEQ ID NO: 51004
  source 1..80: mol_type = other DNA

SEQ ID NO: 84152 - DNA, 80 bp, synthetic construct; identical to SEQ ID NO: 51005
  source 1..80: mol_type = other DNA

SEQ ID NO: 84153 - DNA, 80 bp, synthetic construct; identical to SEQ ID NO: 51006
  source 1..80: mol_type = other DNA

SEQ ID NO: 84154 - DNA, 80 bp, synthetic construct; identical to SEQ ID NO: 51007
  source 1..80: mol_type = other DNA

SEQ ID NO: 84155 - DNA, 80 bp, synthetic construct; identical to SEQ ID NO: 51008
  source 1..80: mol_type = other DNA

SEQ ID NO: 84156 - DNA, 80 bp, synthetic construct; identical to SEQ ID NO: 51009
  source 1..80: mol_type = other DNA

SEQ ID NO: 84157 - DNA, 80 bp, synthetic construct; identical to SEQ ID NO: 51010
  source 1..80: mol_type = other DNA

SEQ ID NO: 84158 - DNA, 80 bp, synthetic construct; identical to SEQ ID NO: 16591
  source 1..80: mol_type = other DNA

SEQ ID NO: 84159 - DNA, 80 bp, synthetic construct; identical to SEQ ID NO: 51012
  source 1..80: mol_type = other DNA

SEQ ID NO: 84160 - DNA, 80 bp, synthetic construct; identical to SEQ ID NO: 51013
  source 1..80: mol_type = other DNA

SEQ ID NO: 84161 - DNA, 80 bp, synthetic construct; identical to SEQ ID NO: 51015
  source 1..80: mol_type = other DNA

SEQ ID NO: 84162 - DNA, 80 bp, synthetic construct; identical to SEQ ID NO: 51016
  source 1..80: mol_type = other DNA

SEQ ID NO: 84163 - DNA, 80 bp, synthetic construct; identical to SEQ ID NO: 51017
  source 1..80: mol_type = other DNA

SEQ ID NO: 84164 - DNA, 80 bp, synthetic construct; identical to SEQ ID NO: 51018
  source 1..80: mol_type = other DNA

SEQ ID NO: 84165 - DNA, 80 bp, synthetic construct; identical to SEQ ID NO: 51019
  source 1..80: mol_type = other DNA

SEQ ID NO: 84166 - DNA, 80 bp, synthetic construct; identical to SEQ ID NO: 16593
  source 1..80: mol_type = other DNA

SEQ ID NO: 84167 - DNA, 80 bp, synthetic construct; identical to SEQ ID NO: 51021
  source 1..80: mol_type = other DNA

SEQ ID NO: 84168 - DNA, 80 bp, synthetic construct; identical to SEQ ID NO: 51022
  source 1..80: mol_type = other DNA

SEQ ID NO: 84169 - DNA, 80 bp, synthetic construct; identical to SEQ ID NO: 51023
  source 1..80: mol_type = other DNA

SEQ ID NO: 84170 - DNA, 80 bp, synthetic construct; identical to SEQ ID NO: 51024
  source 1..80: mol_type = other DNA

SEQ ID NO: 84171 - DNA, 80 bp, synthetic construct; identical to SEQ ID NO: 16594
  source 1..80: mol_type = other DNA

SEQ ID NO: 84172 - DNA, 80 bp, synthetic construct; identical to SEQ ID NO: 51026
  source 1..80: mol_type = other DNA

SEQ ID NO: 84173 - DNA, 80 bp, synthetic construct; identical to SEQ ID NO: 51027
  source 1..80: mol_type = other DNA

SEQ ID NO: 84174 - DNA, 80 bp, synthetic construct; identical to SEQ ID NO: 51029
  source 1..80: mol_type = other DNA

SEQ ID NO: 84175 - DNA, 80 bp, synthetic construct; identical to SEQ ID NO: 16595
  source 1..80: mol_type = other DNA

SEQ ID NO: 84176 - DNA, 80 bp, synthetic construct; identical to SEQ ID NO: 51031
  source 1..80: mol_type = other DNA

SEQ ID NO: 84177 - DNA, 80 bp, synthetic construct; identical to SEQ ID NO: 51032
  source 1..80: mol_type = other DNA

SEQ ID NO: 84178 - DNA, 80 bp, synthetic construct; identical to SEQ ID NO: 51033
  source 1..80: mol_type = other DNA

SEQ ID NO: 84179 - DNA, 80 bp, synthetic construct; identical to SEQ ID NO: 51034
  source 1..80: mol_type = other DNA

SEQ ID NO: 84180 - DNA, 80 bp, synthetic construct; identical to SEQ ID NO: 51035
  source 1..80: mol_type = other DNA

SEQ ID NO: 84181 - DNA, 80 bp, synthetic construct; identical to SEQ ID NO: 51037
  source 1..80: mol_type = other DNA

SEQ ID NO: 84182 - DNA, 80 bp, synthetic construct; identical to SEQ ID NO: 51038
  source 1..80: mol_type = other DNA

SEQ ID NO: 84183 - DNA, 80 bp, synthetic construct; identical to SEQ ID NO: 51039
  source 1..80: mol_type = other DNA

SEQ ID NO: 84184 - DNA, 80 bp, synthetic construct; identical to SEQ ID NO: 51040
  source 1..80: mol_type = other DNA

SEQ ID NO: 84185 - DNA, 80 bp, synthetic construct; identical to SEQ ID NO: 51041
  source 1..80: mol_type = other DNA

SEQ ID NO: 84186 - DNA, 80 bp, synthetic construct; identical to SEQ ID NO: 51042
  source 1..80: mol_type = other DNA

SEQ ID NO: 84187 - DNA, 80 bp, synthetic construct; identical to SEQ ID NO: 51043
  source 1..80: mol_type = other DNA

SEQ ID NO: 84188 - DNA, 80 bp, synthetic construct; identical to SEQ ID NO: 51044
  source 1..80: mol_type = other DNA

SEQ ID NO: 84189 - DNA, 80 bp, synthetic construct; identical to SEQ ID NO: 51045
  source 1..80: mol_type = other DNA

SEQ ID NO: 84190 - DNA, 80 bp, synthetic construct; identical to SEQ ID NO: 51046
  source 1..80: mol_type = other DNA

SEQ ID NO: 84191 - DNA, 80 bp, synthetic construct; identical to SEQ ID NO: 16599
  source 1..80: mol_type = other DNA

SEQ ID NO: 84192 - DNA, 80 bp, synthetic construct; identical to SEQ ID NO: 51048
  source 1..80: mol_type = other DNA

SEQ ID NO: 84193 - DNA, 80 bp, synthetic construct; identical to SEQ ID NO: 51049
  source 1..80: mol_type = other DNA

SEQ ID NO: 84194 - DNA, 80 bp, synthetic construct; identical to SEQ ID NO: 51050
  source 1..80: mol_type = other DNA

SEQ ID NO: 84195 - DNA, 80 bp, synthetic construct; identical to SEQ ID NO: 51051
  source 1..80: mol_type = other DNA

SEQ ID NO: 84196 - DNA, 80 bp, synthetic construct; identical to SEQ ID NO: 51052
  source 1..80: mol_type = other DNA

SEQ ID NO: 84197 - DNA, 80 bp, synthetic construct; identical to SEQ ID NO: 16600
  source 1..80: mol_type = other DNA

SEQ ID NO: 84198 - DNA, 80 bp, synthetic construct; identical to SEQ ID NO: 51054
  source 1..80: mol_type = other DNA

SEQ ID NO: 84199 - DNA, 80 bp, synthetic construct; identical to SEQ ID NO: 51055
  source 1..80: mol_type = other DNA

SEQ ID NO: 84200 - DNA, 80 bp, synthetic construct; identical to SEQ ID NO: 51056
  source 1..80: mol_type = other DNA

SEQ ID NO: 84201 - DNA, 80 bp, synthetic construct; identical to SEQ ID NO: 51057
  source 1..80: mol_type = other DNA

SEQ ID NO: 84202 - DNA, 80 bp, synthetic construct; identical to SEQ ID NO: 51058
  source 1..80: mol_type = other DNA

SEQ ID NO: 84203 - DNA, 80 bp, synthetic construct; identical to SEQ ID NO: 16602
  source 1..80: mol_type = other DNA

SEQ ID NO: 84204 - DNA, 80 bp, synthetic construct; identical to SEQ ID NO: 51060
  source 1..80: mol_type = other DNA

SEQ ID NO: 84205 - DNA, 80 bp, synthetic construct; identical to SEQ ID NO: 51061
  source 1..80: mol_type = other DNA

SEQ ID NO: 84206 - DNA, 80 bp, synthetic construct; identical to SEQ ID NO: 51062
  source 1..80: mol_type = other DNA

SEQ ID NO: 84207 - DNA, 80 bp, synthetic construct; identical to SEQ ID NO: 16603
  source 1..80: mol_type = other DNA

SEQ ID NO: 84208 - DNA, 80 bp, synthetic construct; identical to SEQ ID NO: 51064
  source 1..80: mol_type = other DNA

SEQ ID NO: 84209 - DNA, 80 bp, synthetic construct; identical to SEQ ID NO: 51065
  source 1..80: mol_type = other DNA

SEQ ID NO: 84210 - DNA, 80 bp, synthetic construct; identical to SEQ ID NO: 16604
  source 1..80: mol_type = other DNA

SEQ ID NO: 84211 - DNA, 80 bp, synthetic construct; identical to SEQ ID NO: 16629
  source 1..80: mol_type = other DNA

SEQ ID NO: 84212 - DNA, 80 bp, synthetic construct; identical to SEQ ID NO: 51070
  source 1..80: mol_type = other DNA

SEQ ID NO: 84213 - DNA, 80 bp, synthetic construct; identical to SEQ ID NO: 51072
  source 1..80: mol_type = other DNA

SEQ ID NO: 84214 - DNA, 80 bp, synthetic construct; identical to SEQ ID NO: 51073
  source 1..80: mol_type = other DNA

SEQ ID NO: 84215 - DNA, 80 bp, synthetic construct; identical to SEQ ID NO: 51074
  source 1..80: mol_type = other DNA

SEQ ID NO: 84216 - DNA, 80 bp, synthetic construct; identical to SEQ ID NO: 51075
  source 1..80: mol_type = other DNA

SEQ ID NO: 84217 - DNA, 80 bp, synthetic construct; identical to SEQ ID NO: 16637
  source 1..80: mol_type = other DNA

SEQ ID NO: 84218 - DNA, 80 bp, synthetic construct; identical to SEQ ID NO: 51077
  source 1..80: mol_type = other DNA

SEQ ID NO: 84219 - DNA, 80 bp, synthetic construct; identical to SEQ ID NO: 51078
  source 1..80: mol_type = other DNA

SEQ ID NO: 84220 - DNA, 80 bp, synthetic construct; identical to SEQ ID NO: 51079
  source 1..80: mol_type = other DNA

SEQ ID NO: 84221 - DNA, 80 bp, synthetic construct; identical to SEQ ID NO: 51080
  source 1..80: mol_type = other DNA

SEQ ID NO: 84222 - DNA, 80 bp, synthetic construct; identical to SEQ ID NO: 16638
  source 1..80: mol_type = other DNA

SEQ ID NO: 84223 - DNA, 80 bp, synthetic construct; identical to SEQ ID NO: 51082
  source 1..80: mol_type = other DNA

SEQ ID NO: 84224 - DNA, 80 bp, synthetic construct; identical to SEQ ID NO: 16607
  source 1..80: mol_type = other DNA

SEQ ID NO: 84225 - DNA, 80 bp, synthetic construct; identical to SEQ ID NO: 51084
  source 1..80: mol_type = other DNA

SEQ ID NO: 84226 - DNA, 80 bp, synthetic construct; identical to SEQ ID NO: 51085
  source 1..80: mol_type = other DNA

SEQ ID NO: 84227 - DNA, 80 bp, synthetic construct; identical to SEQ ID NO: 51086
  source 1..80: mol_type = other DNA

SEQ ID NO: 84228 - DNA, 80 bp, synthetic construct; identical to SEQ ID NO: 16608
  source 1..80: mol_type = other DNA

SEQ ID NO: 84229 - DNA, 80 bp, synthetic construct; identical to SEQ ID NO: 51088
  source 1..80: mol_type = other DNA

SEQ ID NO: 84230 - DNA, 80 bp, synthetic construct; identical to SEQ ID NO: 51089
  source 1..80: mol_type = other DNA

SEQ ID NO: 84231 - DNA, 80 bp, synthetic construct; identical to SEQ ID NO: 51090
  source 1..80: mol_type = other DNA

SEQ ID NO: 84232 - DNA, 80 bp, synthetic construct; identical to SEQ ID NO: 51091
  source 1..80: mol_type = other DNA

SEQ ID NO: 84233 - DNA, 80 bp, synthetic construct; identical to SEQ ID NO: 16609
  source 1..80: mol_type = other DNA

SEQ ID NO: 84234 - DNA, 80 bp, synthetic construct; identical to SEQ ID NO: 51093
  source 1..80: mol_type = other DNA

SEQ ID NO: 84235 - DNA, 80 bp, synthetic construct; identical to SEQ ID NO: 51094
  source 1..80: mol_type = other DNA

SEQ ID NO: 84236 - DNA, 80 bp, synthetic construct; identical to SEQ ID NO: 51095
  source 1..80: mol_type = other DNA

SEQ ID NO: 84237 - DNA, 80 bp, synthetic construct; identical to SEQ ID NO: 16610
  source 1..80: mol_type = other DNA

SEQ ID NO: 84238 - DNA, 80 bp, synthetic construct; identical to SEQ ID NO: 51097
  source 1..80: mol_type = other DNA

SEQ ID NO: 84239 - DNA, 80 bp, synthetic construct; identical to SEQ ID NO: 51098
  source 1..80: mol_type = other DNA

SEQ ID NO: 84240 - DNA, 80 bp, synthetic construct; identical to SEQ ID NO: 51099
  source 1..80: mol_type = other DNA

SEQ ID NO: 84241 - DNA, 80 bp, synthetic construct; identical to SEQ ID NO: 51100
  source 1..80: mol_type = other DNA

SEQ ID NO: 84242 - DNA, 80 bp, synthetic construct; identical to SEQ ID NO: 51101
  source 1..80: mol_type = other DNA

SEQ ID NO: 84243 - DNA, 80 bp, synthetic construct; identical to SEQ ID NO: 51102
  source 1..80: mol_type = other DNA

SEQ ID NO: 84244 - DNA, 80 bp, synthetic construct; identical to SEQ ID NO: 51103
  source 1..80: mol_type = other DNA

SEQ ID NO: 84245 - DNA, 80 bp, synthetic construct; identical to SEQ ID NO: 16612
  source 1..80: mol_type = other DNA

SEQ ID NO: 84246 - DNA, 80 bp, synthetic construct; identical to SEQ ID NO: 51105
  source 1..80: mol_type = other DNA

SEQ ID NO: 84247 - DNA, 80 bp, synthetic construct; identical to SEQ ID NO: 51106
  source 1..80: mol_type = other DNA

SEQ ID NO: 84248 - DNA, 80 bp, synthetic construct; identical to SEQ ID NO: 51107
  source 1..80: mol_type = other DNA

SEQ ID NO: 84249 - DNA, 80 bp, synthetic construct; identical to SEQ ID NO: 51108
  source 1..80: mol_type = other DNA

SEQ ID NO: 84250 - DNA, 80 bp, synthetic construct; identical to SEQ ID NO: 51109
  source 1..80: mol_type = other DNA

SEQ ID NO: 84251 - DNA, 80 bp, synthetic construct; identical to SEQ ID NO: 51110
  source 1..80: mol_type = other DNA

SEQ ID NO: 84252 - DNA, 80 bp, synthetic construct; identical to SEQ ID NO: 16614
  source 1..80: mol_type = other DNA

SEQ ID NO: 84253 - DNA, 80 bp, synthetic construct; identical to SEQ ID NO: 51112
  source 1..80: mol_type = other DNA

SEQ ID NO: 84254 - DNA, 80 bp, synthetic construct; identical to SEQ ID NO: 51113
  source 1..80: mol_type = other DNA

SEQ ID NO: 84255 - DNA, 80 bp, synthetic construct; identical to SEQ ID NO: 51114
  source 1..80: mol_type = other DNA

SEQ ID NO: 84256 - DNA, 80 bp, synthetic construct; identical to SEQ ID NO: 16615
  source 1..80: mol_type = other DNA

SEQ ID NO: 84257 - DNA, 80 bp, synthetic construct; identical to SEQ ID NO: 51116
  source 1..80: mol_type = other DNA

SEQ ID NO: 84258 - DNA, 80 bp, synthetic construct; identical to SEQ ID NO: 51117
  source 1..80: mol_type = other DNA

SEQ ID NO: 84259 - DNA, 80 bp, synthetic construct; identical to SEQ ID NO: 51118
  source 1..80: mol_type = other DNA

SEQ ID NO: 84260 - DNA, 80 bp, synthetic construct; identical to SEQ ID NO: 16616
  source 1..80: mol_type = other DNA

SEQ ID NO: 84261 - DNA, 80 bp, synthetic construct; identical to SEQ ID NO: 51120
  source 1..80: mol_type = other DNA

SEQ ID NO: 84262 - DNA, 80 bp, synthetic construct; identical to SEQ ID NO: 51121
  source 1..80: mol_type = other DNA

SEQ ID NO: 84263 - DNA, 80 bp, synthetic construct; identical to SEQ ID NO: 51122
  source 1..80: mol_type = other DNA

SEQ ID NO: 84264 - DNA, 80 bp, synthetic construct; identical to SEQ ID NO: 51123
  source 1..80: mol_type = other DNA

SEQ ID NO: 84265 - DNA, 80 bp, synthetic construct; identical to SEQ ID NO: 51124
  source 1..80: mol_type = other DNA

SEQ ID NO: 84266 - DNA, 80 bp, synthetic construct; identical to SEQ ID NO: 51125
  source 1..80: mol_type = other DNA

SEQ ID NO: 84267 - DNA, 80 bp, synthetic construct; identical to SEQ ID NO: 51127
  source 1..80: mol_type = other DNA

SEQ ID NO: 84268 - DNA, 80 bp, synthetic construct; identical to SEQ ID NO: 51128
  source 1..80: mol_type = other DNA

SEQ ID NO: 84269 - DNA, 80 bp, synthetic construct; identical to SEQ ID NO: 51129
  source 1..80: mol_type = other DNA

SEQ ID NO: 84270 - DNA, 80 bp, synthetic construct; identical to SEQ ID NO: 16618
  source 1..80: mol_type = other DNA

SEQ ID NO: 84271 - DNA, 80 bp, synthetic construct; identical to SEQ ID NO: 51131
  source 1..80: mol_type = other DNA

SEQ ID NO: 84272 - DNA, 80 bp, synthetic construct; identical to SEQ ID NO: 51132
  source 1..80: mol_type = other DNA

SEQ ID NO: 84273 - DNA, 80 bp, synthetic construct; identical to SEQ ID NO: 51133
  source 1..80: mol_type = other DNA

SEQ ID NO: 84274 - DNA, 80 bp, synthetic construct; identical to SEQ ID NO: 51134
  source 1..80: mol_type = other DNA

SEQ ID NO: 84275 - DNA, 80 bp, synthetic construct; identical to SEQ ID NO: 51135
  source 1..80: mol_type = other DNA

SEQ ID NO: 84276 - DNA, 80 bp, synthetic construct; identical to SEQ ID NO: 51136
  source 1..80: mol_type = other DNA

SEQ ID NO: 84277 - DNA, 80 bp, synthetic construct; identical to SEQ ID NO: 51137
  source 1..80: mol_type = other DNA

SEQ ID NO: 84278 - DNA, 80 bp, synthetic construct; identical to SEQ ID NO: 51138
  source 1..80: mol_type = other DNA

SEQ ID NO: 84279 - DNA, 80 bp, synthetic construct; identical to SEQ ID NO: 16620
  source 1..80: mol_type = other DNA

SEQ ID NO: 84280 - DNA, 80 bp, synthetic construct; identical to SEQ ID NO: 51140
  source 1..80: mol_type = other DNA

SEQ ID NO: 84281 - DNA, 80 bp, synthetic construct; identical to SEQ ID NO: 51141
  source 1..80: mol_type = other DNA

SEQ ID NO: 84282 - DNA, 80 bp, synthetic construct; identical to SEQ ID NO: 51142
  source 1..80: mol_type = other DNA

SEQ ID NO: 84283 - DNA, 80 bp, synthetic construct; identical to SEQ ID NO: 51143
  source 1..80: mol_type = other DNA

SEQ ID NO: 84284 - DNA, 80 bp, synthetic construct; identical to SEQ ID NO: 16621
  source 1..80: mol_type = other DNA

SEQ ID NO: 84285 - DNA, 80 bp, synthetic construct; identical to SEQ ID NO: 51145
  source 1..80: mol_type = other DNA

SEQ ID NO: 84286 - DNA, 80 bp, synthetic construct; identical to SEQ ID NO: 51146
  source 1..80: mol_type = other DNA

SEQ ID NO: 84287 - DNA, 80 bp, synthetic construct; identical to SEQ ID NO: 51147
  source 1..80: mol_type = other DNA

SEQ ID NO: 84288 - DNA, 80 bp, synthetic construct; identical to SEQ ID NO: 16622
  source 1..80: mol_type = other DNA

SEQ ID NO: 84289 - DNA, 80 bp, synthetic construct; identical to SEQ ID NO: 51149
  source 1..80: mol_type = other DNA

SEQ ID NO: 84290 - DNA, 80 bp, synthetic construct; identical to SEQ ID NO: 51150
  source 1..80: mol_type = other DNA

SEQ ID NO: 84291 - DNA, 80 bp, synthetic construct; identical to SEQ ID NO: 51151
  source 1..80: mol_type = other DNA

SEQ ID NO: 84292 - DNA, 80 bp, synthetic construct; identical to SEQ ID NO: 16623
  source 1..80: mol_type = other DNA

SEQ ID NO: 84293 - DNA, 80 bp, synthetic construct; identical to SEQ ID NO: 51153
  source 1..80: mol_type = other DNA

SEQ ID NO: 84294 - DNA, 80 bp, synthetic construct; identical to SEQ ID NO: 51154
  source 1..80: mol_type = other DNA

SEQ ID NO: 84295 - DNA, 80 bp, synthetic construct; identical to SEQ ID NO: 51155
  source 1..80: mol_type = other DNA

SEQ ID NO: 84296 - DNA, 80 bp, synthetic construct; identical to SEQ ID NO: 51156
  source 1..80: mol_type = other DNA

SEQ ID NO: 84297 - DNA, 80 bp, synthetic construct; identical to SEQ ID NO: 16625
  source 1..80: mol_type = other DNA

SEQ ID NO: 84298 - DNA, 80 bp, synthetic construct; identical to SEQ ID NO: 51158
  source 1..80: mol_type = other DNA

SEQ ID NO: 84299 - DNA, 80 bp, synthetic construct; identical to SEQ ID NO: 51159
  source 1..80: mol_type = other DNA

SEQ ID NO: 84300 - DNA, 80 bp, synthetic construct; identical to SEQ ID NO: 16601
  source 1..80: mol_type = other DNA

SEQ ID NO: 84301 - DNA, 80 bp, synthetic construct; identical to SEQ ID NO: 51161
  source 1..80: mol_type = other DNA

SEQ ID NO: 84302 - DNA, 80 bp, synthetic construct; identical to SEQ ID NO: 51162
  source 1..80: mol_type = other DNA

SEQ ID NO: 84303 - DNA, 80 bp, synthetic construct; identical to SEQ ID NO: 16626
  source 1..80: mol_type = other DNA

SEQ ID NO: 84304 - DNA, 80 bp, synthetic construct; identical to SEQ ID NO: 51164
  source 1..80: mol_type = other DNA

SEQ ID NO: 84305 - DNA, 80 bp, synthetic construct; identical to SEQ ID NO: 16627
  source 1..80: mol_type = other DNA

SEQ ID NO: 84306 - DNA, 80 bp, synthetic construct; identical to SEQ ID NO: 51166
  source 1..80: mol_type = other DNA

SEQ ID NO: 84307 - DNA, 80 bp, synthetic construct; identical to SEQ ID NO: 51167
  source 1..80: mol_type = other DNA

SEQ ID NO: 84308 - DNA, 80 bp, synthetic construct; identical to SEQ ID NO: 51168
  source 1..80: mol_type = other DNA

SEQ ID NO: 84309 - DNA, 80 bp, synthetic construct; identical to SEQ ID NO: 16628
  source 1..80: mol_type = other DNA

SEQ ID NO: 84310 - DNA, 80 bp, synthetic construct; identical to SEQ ID NO: 51170
  source 1..80: mol_type = other DNA

SEQ ID NO: 84311 - DNA, 80 bp, synthetic construct; identical to SEQ ID NO: 51171
  source 1..80: mol_type = other DNA

SEQ ID NO: 84312 - DNA, 80 bp, synthetic construct; identical to SEQ ID NO: 51172
  source 1..80: mol_type = other DNA

SEQ ID NO: 84313 - DNA, 80 bp, synthetic construct; identical to SEQ ID NO: 51174
  source 1..80: mol_type = other DNA

SEQ ID NO: 84314 - DNA, 80 bp, synthetic construct; identical to SEQ ID NO: 16605
  source 1..80: mol_type = other DNA

SEQ ID NO: 84315 - DNA, 80 bp, synthetic construct; identical to SEQ ID NO: 51176
  source 1..80: mol_type = other DNA

SEQ ID NO: 84316 - DNA, 80 bp, synthetic construct; identical to SEQ ID NO: 51177
  source 1..80: mol_type = other DNA

SEQ ID NO: 84317 - DNA, 80 bp, synthetic construct; identical to SEQ ID NO: 16630
  source 1..80: mol_type = other DNA

SEQ ID NO: 84318 - DNA, 80 bp, synthetic construct; identical to SEQ ID NO: 51180
  source 1..80: mol_type = other DNA

SEQ ID NO: 84319 - DNA, 80 bp, synthetic construct; identical to SEQ ID NO: 51182
  source 1..80: mol_type = other DNA

SEQ ID NO: 84320 - DNA, 80 bp, synthetic construct; identical to SEQ ID NO: 51184
  source 1..80: mol_type = other DNA

SEQ ID NO: 84321 - DNA, 80 bp, synthetic construct; identical to SEQ ID NO: 51186
  source 1..80: mol_type = other DNA

SEQ ID NO: 84322 - DNA, 80 bp, synthetic construct; identical to SEQ ID NO: 16632
  source 1..80: mol_type = other DNA

SEQ ID NO: 84323 - DNA, 80 bp, synthetic construct; identical to SEQ ID NO: 51189
  source 1..80: mol_type = other DNA

SEQ ID NO: 84324 - DNA, 80 bp, synthetic construct; identical to SEQ ID NO: 51191
  source 1..80: mol_type = other DNA

SEQ ID NO: 84325 - DNA, 80 bp, synthetic construct; identical to SEQ ID NO: 51193
  source 1..80: mol_type = other DNA

SEQ ID NO: 84326 - DNA, 80 bp, synthetic construct; identical to SEQ ID NO: 51195
  source 1..80: mol_type = other DNA

SEQ ID NO: 84327 - DNA, 80 bp, synthetic construct; identical to SEQ ID NO: 51196
  source 1..80: mol_type = other DNA

SEQ ID NO: 84328 - DNA, 80 bp, synthetic construct; identical to SEQ ID NO: 16635
  source 1..80: mol_type = other DNA

SEQ ID NO: 84329 - DNA, 80 bp, synthetic construct; identical to SEQ ID NO: 51200
  source 1..80: mol_type = other DNA

SEQ ID NO: 84330 - DNA, 80 bp, synthetic construct; identical to SEQ ID NO: 16636
  source 1..80: mol_type = other DNA

SEQ ID NO: 84331 - DNA, 80 bp, synthetic construct; identical to SEQ ID NO: 51203
  source 1..80: mol_type = other DNA

SEQ ID NO: 84332 - DNA, 80 bp, synthetic construct; identical to SEQ ID NO: 16606
  source 1..80: mol_type = other DNA

SEQ ID NO: 84333 - DNA, 80 bp, synthetic construct; identical to SEQ ID NO: 51205
  source 1..80: mol_type = other DNA

SEQ ID NO: 84334 - DNA, 80 bp, synthetic construct; identical to SEQ ID NO: 51206
  source 1..80: mol_type = other DNA

SEQ ID NO: 84335 - DNA, 80 bp, synthetic construct; identical to SEQ ID NO: 51207
  source 1..80: mol_type = other DNA

SEQ ID NO: 84336 - DNA, 80 bp, synthetic construct; identical to SEQ ID NO: 51208
  source 1..80: mol_type = other DNA

SEQ ID NO: 84337 - DNA, 80 bp, synthetic construct; identical to SEQ ID NO: 51209
  source 1..80: mol_type = other DNA

SEQ ID NO: 84338 - DNA, 80 bp, synthetic construct; identical to SEQ ID NO: 51210
  source 1..80: mol_type = other DNA

SEQ ID NO: 84339 - DNA, 80 bp, synthetic construct; identical to SEQ ID NO: 51211
  source 1..80: mol_type = other DNA

SEQ ID NO: 84340 - DNA, 80 bp, synthetic construct; identical to SEQ ID NO: 51212
  source 1..80: mol_type = other DNA

SEQ ID NO: 84341 - DNA, 80 bp, synthetic construct; identical to SEQ ID NO: 16639
  source 1..80: mol_type = other DNA

SEQ ID NO: 84342 - DNA, 80 bp, synthetic construct; identical to SEQ ID NO: 51214
  source 1..80: mol_type = other DNA

SEQ ID NO: 84343 - DNA, 80 bp, synthetic construct; identical to SEQ ID NO: 51215
  source 1..80: mol_type = other DNA

SEQ ID NO: 84344 - DNA, 80 bp, synthetic construct; identical to SEQ ID NO: 51216
  source 1..80: mol_type = other DNA

SEQ ID NO: 84345 - DNA, 80 bp, synthetic construct; identical to SEQ ID NO: 16640
  source 1..80: mol_type = other DNA

SEQ ID NO: 84346 - DNA, 80 bp, synthetic construct; identical to SEQ ID NO: 51219
  source 1..80: mol_type = other DNA

SEQ ID NO: 84347 - DNA, 80 bp, synthetic construct; identical to SEQ ID NO: 51220
  source 1..80: mol_type = other DNA

SEQ ID NO: 84348 - DNA, 80 bp, synthetic construct; identical to SEQ ID NO: 51221
  source 1..80: mol_type = other DNA

SEQ ID NO: 84349 - DNA, 80 bp, synthetic construct; identical to SEQ ID NO: 51222
  source 1..80: mol_type = other DNA

SEQ ID NO: 84350 - DNA, 80 bp, synthetic construct; identical to SEQ ID NO: 51223
  source 1..80: mol_type = other DNA

SEQ ID NO: 84351 - DNA, 80 bp, synthetic construct; identical to SEQ ID NO: 51224
  source 1..80: mol_type = other DNA

SEQ ID NO: 84352 - DNA, 80 bp, synthetic construct; identical to SEQ ID NO: 51225
  source 1..80: mol_type = other DNA

SEQ ID NO: 84353 - DNA, 80 bp, synthetic construct; identical to SEQ ID NO: 16642
  source 1..80: mol_type = other DNA

SEQ ID NO: 84354 - DNA, 80 bp, synthetic construct; identical to SEQ ID NO: 51227
  source 1..80: mol_type = other DNA

SEQ ID NO: 84355 - DNA, 80 bp, synthetic construct; identical to SEQ ID NO: 51228
  source 1..80: mol_type = other DNA

SEQ ID NO: 84356 - DNA, 80 bp, synthetic construct; identical to SEQ ID NO: 51229
  source 1..80: mol_type = other DNA

SEQ ID NO: 84357 - DNA, 80 bp, synthetic construct; identical to SEQ ID NO: 16611
  source 1..80: mol_type = other DNA

SEQ ID NO: 84358 - DNA, 80 bp, synthetic construct; identical to SEQ ID NO: 51231
  source 1..80: mol_type = other DNA

SEQ ID NO: 84359 - DNA, 80 bp, synthetic construct; identical to SEQ ID NO: 51232
  source 1..80: mol_type = other DNA

SEQ ID NO: 84360 - DNA, 80 bp, synthetic construct; identical to SEQ ID NO: 51233
  source 1..80: mol_type = other DNA

SEQ ID NO: 84361 - DNA, 80 bp, synthetic construct; identical to SEQ ID NO: 16644
  source 1..80: mol_type = other DNA

SEQ ID NO: 84362 - DNA, 80 bp, synthetic construct; identical to SEQ ID NO: 51235
  source 1..80: mol_type = other DNA

SEQ ID NO: 84363 - DNA, 80 bp, synthetic construct; identical to SEQ ID NO: 51236
  source 1..80: mol_type = other DNA

SEQ ID NO: 84364 - DNA, 80 bp, synthetic construct; identical to SEQ ID NO: 51237
  source 1..80: mol_type = other DNA

SEQ ID NO: 84365 - DNA, 80 bp, synthetic construct; identical to SEQ ID NO: 51238
  source 1..80: mol_type = other DNA

SEQ ID NO: 84366 - DNA, 80 bp, synthetic construct; identical to SEQ ID NO: 16645
  source 1..80: mol_type = other DNA

SEQ ID NO: 84367 - DNA, 80 bp, synthetic construct; identical to SEQ ID NO: 51240
  source 1..80: mol_type = other DNA

SEQ ID NO: 84368 - DNA, 80 bp, synthetic construct; identical to SEQ ID NO: 51241
  source 1..80: mol_type = other DNA

SEQ ID NO: 84369 - DNA, 80 bp, synthetic construct; identical to SEQ ID NO: 16613
  source 1..80: mol_type = other DNA

SEQ ID NO: 84370 - DNA, 80 bp, synthetic construct; identical to SEQ ID NO: 51243
  source 1..80: mol_type = other DNA

SEQ ID NO: 84371 - DNA, 80 bp, synthetic construct; identical to SEQ ID NO: 16646
  source 1..80: mol_type = other DNA

SEQ ID NO: 84372 - DNA, 80 bp, synthetic construct; identical to SEQ ID NO: 51245
  source 1..80: mol_type = other DNA

SEQ ID NO: 84373 - DNA, 80 bp, synthetic construct; identical to SEQ ID NO: 51246
  source 1..80: mol_type = other DNA

SEQ ID NO: 84374 - DNA, 80 bp, synthetic construct; identical to SEQ ID NO: 51247
  source 1..80: mol_type = other DNA

SEQ ID NO: 84375 - DNA, 80 bp, synthetic construct; identical to SEQ ID NO: 51248
  source 1..80: mol_type = other DNA

SEQ ID NO: 84376 - DNA, 80 bp, synthetic construct; identical to SEQ ID NO: 16647
  source 1..80: mol_type = other DNA

SEQ ID NO: 84377 - DNA, 80 bp, synthetic construct; identical to SEQ ID NO: 51250
  source 1..80: mol_type = other DNA

SEQ ID NO: 84378 - DNA, 80 bp, synthetic construct; identical to SEQ ID NO: 51251
  source 1..80: mol_type = other DNA

SEQ ID NO: 84379 - DNA, 80 bp, synthetic construct; identical to SEQ ID NO: 51252
  source 1..80: mol_type = other DNA

SEQ ID NO: 84380 - DNA, 80 bp, synthetic construct; identical to SEQ ID NO: 51253
  source 1..80: mol_type = other DNA

SEQ ID NO: 84381 - DNA, 80 bp, synthetic construct; identical to SEQ ID NO: 51254
  source 1..80: mol_type = other DNA

SEQ ID NO: 84382 - DNA, 80 bp, synthetic construct; identical to SEQ ID NO: 51255
  source 1..80: mol_type = other DNA

SEQ ID NO: 84383 - DNA, 80 bp, synthetic construct; identical to SEQ ID NO: 51256
  source 1..80: mol_type = other DNA

SEQ ID NO: 84384 - DNA, 80 bp, synthetic construct; identical to SEQ ID NO: 51257
  source 1..80: mol_type = other DNA

SEQ ID NO: 84385 - DNA, 80 bp, synthetic construct; identical to SEQ ID NO: 51258
  source 1..80: mol_type = other DNA

SEQ ID NO: 84386 - DNA, 80 bp, synthetic construct; identical to SEQ ID NO: 16617
  source 1..80: mol_type = other DNA

SEQ ID NO: 84387 - DNA, 80 bp, synthetic construct; identical to SEQ ID NO: 51261
  source 1..80: mol_type = other DNA

SEQ ID NO: 84388 - DNA, 80 bp, synthetic construct; identical to SEQ ID NO: 51262
  source 1..80: mol_type = other DNA

SEQ ID NO: 84389 - DNA, 80 bp, synthetic construct; identical to SEQ ID NO: 51263
  source 1..80: mol_type = other DNA

SEQ ID NO: 84390 - DNA, 80 bp, synthetic construct; identical to SEQ ID NO: 51264
  source 1..80: mol_type = other DNA

SEQ ID NO: 84391 - DNA, 80 bp, synthetic construct; identical to SEQ ID NO: 51265
  source 1..80: mol_type = other DNA

SEQ ID NO: 84392 - DNA, 80 bp, synthetic construct; identical to SEQ ID NO: 51266
  source 1..80: mol_type = other DNA

SEQ ID NO: 84393 - DNA, 80 bp, synthetic construct; identical to SEQ ID NO: 51267
  source 1..80: mol_type = other DNA

SEQ ID NO: 84394 - DNA, 80 bp, synthetic construct; identical to SEQ ID NO: 51268
  source 1..80: mol_type = other DNA

SEQ ID NO: 84395 - DNA, 80 bp, synthetic construct; identical to SEQ ID NO: 16619
  source 1..80: mol_type = other DNA

SEQ ID NO: 84396 - DNA, 80 bp, synthetic construct; identical to SEQ ID NO: 51271
  source 1..80: mol_type = other DNA

SEQ ID NO: 84397 - DNA, 80 bp, synthetic construct; identical to SEQ ID NO: 51272
  source 1..80: mol_type = other DNA

SEQ ID NO: 84398 - DNA, 80 bp, synthetic construct; identical to SEQ ID NO: 51273
  source 1..80: mol_type = other DNA

SEQ ID NO: 84399 - DNA, 80 bp, synthetic construct; identical to SEQ ID NO: 51274
  source 1..80: mol_type = other DNA

SEQ ID NO: 84400 - DNA, 80 bp, synthetic construct; identical to SEQ ID NO: 51275
  source 1..80: mol_type = other DNA

SEQ ID NO: 84401 - DNA, 80 bp, synthetic construct; identical to SEQ ID NO: 51276
  source 1..80: mol_type = other DNA

SEQ ID NO: 84402 - DNA, 80 bp, synthetic construct; identical to SEQ ID NO: 51277
  source 1..80: mol_type = other DNA

SEQ ID NO: 84403 - DNA, 80 bp, synthetic construct; identical to SEQ ID NO: 16653
  source 1..80: mol_type = other DNA

SEQ ID NO: 84404 - DNA, 80 bp, synthetic construct; identical to SEQ ID NO: 51279
  source 1..80: mol_type = other DNA

SEQ ID NO: 84405 - DNA, 80 bp, synthetic construct; identical to SEQ ID NO: 51280
  source 1..80: mol_type = other DNA

SEQ ID NO: 84406 - DNA, 80 bp, synthetic construct; identical to SEQ ID NO: 51281
  source 1..80: mol_type = other DNA

SEQ ID NO: 84407 - DNA, 80 bp, synthetic construct; identical to SEQ ID NO: 16654
  source 1..80: mol_type = other DNA

SEQ ID NO: 84408 - DNA, 80 bp, synthetic construct; identical to SEQ ID NO: 51283
  source 1..80: mol_type = other DNA

SEQ ID NO: 84409 - DNA, 80 bp, synthetic construct; identical to SEQ ID NO: 51284
  source 1..80: mol_type = other DNA

SEQ ID NO: 84410 - DNA, 80 bp, synthetic construct; identical to SEQ ID NO: 51285
  source 1..80: mol_type = other DNA

SEQ ID NO: 84411 - DNA, 80 bp, synthetic construct; identical to SEQ ID NO: 51286
  source 1..80: mol_type = other DNA

SEQ ID NO: 84412 - DNA, 80 bp, synthetic construct; identical to SEQ ID NO: 16655
  source 1..80: mol_type = other DNA

SEQ ID NO: 84413 - DNA, 80 bp, synthetic construct; identical to SEQ ID NO: 51288
  source 1..80: mol_type = other DNA

SEQ ID NO: 84414 - DNA, 80 bp, synthetic construct; identical to SEQ ID NO: 51289
  source 1..80: mol_type = other DNA

SEQ ID NO: 84415 - DNA, 80 bp, synthetic construct; identical to SEQ ID NO: 51290
  source 1..80: mol_type = other DNA

SEQ ID NO: 84416 - DNA, 80 bp, synthetic construct; identical to SEQ ID NO: 16624
  source 1..80: mol_type = other DNA

SEQ ID NO: 84417 - DNA, 80 bp, synthetic construct; identical to SEQ ID NO: 51292
  source 1..80: mol_type = other DNA

SEQ ID NO: 84418 - DNA, 80 bp, synthetic construct; identical to SEQ ID NO: 51293
  source 1..80: mol_type = other DNA

SEQ ID NO: 84419 - DNA, 80 bp, synthetic construct; identical to SEQ ID NO: 51294
  source 1..80: mol_type = other DNA

SEQ ID NO: 84420 - DNA, 80 bp, synthetic construct; identical to SEQ ID NO: 16657
  source 1..80: mol_type = other DNA

SEQ ID NO: 84421 - DNA, 80 bp, synthetic construct; identical to SEQ ID NO: 51297
  source 1..80: mol_type = other DNA

SEQ ID NO: 84422 - DNA, 80 bp, synthetic construct; identical to SEQ ID NO: 51298
  source 1..80: mol_type = other DNA

SEQ ID NO: 84423 - DNA, 80 bp, synthetic construct; identical to SEQ ID NO: 16658
  source 1..80: mol_type = other DNA

SEQ ID NO: 84424 - DNA, 80 bp, synthetic construct; identical to SEQ ID NO: 51300
  source 1..80: mol_type = other DNA

SEQ ID NO: 84425 - DNA, 80 bp, synthetic construct; identical to SEQ ID NO: 51301
  source 1..80: mol_type = other DNA

SEQ ID NO: 84426 - DNA, 80 bp, synthetic construct; identical to SEQ ID NO: 16659
  source 1..80: mol_type = other DNA

SEQ ID NO: 84427 - DNA, 80 bp, synthetic construct; identical to SEQ ID NO: 51303
  source 1..80: mol_type = other DNA

SEQ ID NO: 84428 - DNA, 80 bp, synthetic construct; identical to SEQ ID NO: 51304
  source 1..80: mol_type = other DNA

SEQ ID NO: 84429 - DNA, 80 bp, synthetic construct; identical to SEQ ID NO: 51305
  source 1..80: mol_type = other DNA

SEQ ID NO: 84430 - DNA, 80 bp, synthetic construct; identical to SEQ ID NO: 16660
  source 1..80: mol_type = other DNA

SEQ ID NO: 84431 - DNA, 80 bp, synthetic construct; identical to SEQ ID NO: 51307
  source 1..80: mol_type = other DNA

SEQ ID NO: 84432 - DNA, 80 bp, synthetic construct; identical to SEQ ID NO: 51308
  source 1..80: mol_type = other DNA

SEQ ID NO: 84433 - DNA, 80 bp, synthetic construct; identical to SEQ ID NO: 51309
  source 1..80: mol_type = other DNA

SEQ ID NO: 84434 - DNA, 80 bp, synthetic construct; identical to SEQ ID NO: 51310
  source 1..80: mol_type = other DNA

SEQ ID NO: 84435 - DNA, 80 bp, synthetic construct; identical to SEQ ID NO: 16661
  source 1..80: mol_type = other DNA

SEQ ID NO: 84436 - DNA, 80 bp, synthetic construct; identical to SEQ ID NO: 51312
  source 1..80: mol_type = other DNA

SEQ ID NO: 84437 - DNA, 80 bp, synthetic construct; identical to SEQ ID NO: 51313
  source 1..80: mol_type = other DNA

SEQ ID NO: 84438 - DNA, 80 bp, synthetic construct; identical to SEQ ID NO: 51314
  source 1..80: mol_type = other DNA

SEQ ID NO: 84439 - DNA, 80 bp, synthetic construct; identical to SEQ ID NO: 16662
  source 1..80: mol_type = other DNA

SEQ ID NO: 84440 - DNA, 80 bp, synthetic construct; identical to SEQ ID NO: 51316
  source 1..80: mol_type = other DNA

SEQ ID NO: 84441 - DNA, 80 bp, synthetic construct; identical to SEQ ID NO: 51317
  source 1..80: mol_type = other DNA

SEQ ID NO: 84442 - DNA, 80 bp, synthetic construct; identical to SEQ ID NO: 51318
  source 1..80: mol_type = other DNA

SEQ ID NO: 84443 - DNA, 80 bp, synthetic construct; identical to SEQ ID NO: 51320
  source 1..80: mol_type = other DNA

SEQ ID NO: 84444 - DNA, 80 bp, synthetic construct; identical to SEQ ID NO: 51321
  source 1..80: mol_type = other DNA

SEQ ID NO: 84445 - DNA, 80 bp, synthetic construct; identical to SEQ ID NO: 16664
  source 1..80: mol_type = other DNA

SEQ ID NO: 84446 - DNA, 80 bp, synthetic construct; identical to SEQ ID NO: 16665
  source 1..80: mol_type = other DNA

SEQ ID NO: 84447 - DNA, 80 bp, synthetic construct; identical to SEQ ID NO: 51324
  source 1..80: mol_type = other DNA

SEQ ID NO: 84448 - DNA, 80 bp, synthetic construct; identical to SEQ ID NO: 51325
  source 1..80: mol_type = other DNA

SEQ ID NO: 84449 - DNA, 80 bp, synthetic construct; identical to SEQ ID NO: 51326
  source 1..80: mol_type = other DNA

SEQ ID NO: 84450 - DNA, 80 bp, synthetic construct; identical to SEQ ID NO: 16666
  source 1..80: mol_type = other DNA

SEQ ID NO: 84451 - DNA, 80 bp, synthetic construct; identical to SEQ ID NO: 51328
  source 1..80: mol_type = other DNA

SEQ ID NO: 84452 - DNA, 80 bp, synthetic construct; identical to SEQ ID NO: 51329
  source 1..80: mol_type = other DNA

SEQ ID NO: 84453 - DNA, 80 bp, synthetic construct; identical to SEQ ID NO: 51330
  source 1..80: mol_type = other DNA

SEQ ID NO: 84454 - DNA, 80 bp, synthetic construct; identical to SEQ ID NO: 16667
  source 1..80: mol_type = other DNA

SEQ ID NO: 84455 - DNA, 80 bp, synthetic construct; identical to SEQ ID NO: 51333
  source 1..80: mol_type = other DNA

SEQ ID NO: 84456 - DNA, 80 bp, synthetic construct; identical to SEQ ID NO: 51334
  source 1..80: mol_type = other DNA

SEQ ID NO: 84457 - DNA, 80 bp, synthetic construct; identical to SEQ ID NO: 51335
  source 1..80: mol_type = other DNA

SEQ ID NO: 84458 - DNA, 80 bp, synthetic construct; identical to SEQ ID NO: 16668
  source 1..80: mol_type = other DNA

SEQ ID NO: 84459 - DNA, 80 bp, synthetic construct; identical to SEQ ID NO: 51337
  source 1..80: mol_type = other DNA

SEQ ID NO: 84460 - DNA, 80 bp, synthetic construct; identical to SEQ ID NO: 51338
  source 1..80: mol_type = other DNA

SEQ ID NO: 84461 - DNA, 80 bp, synthetic construct; identical to SEQ ID NO: 51339
  source 1..80: mol_type = other DNA

SEQ ID NO: 84462 - DNA, 80 bp, synthetic construct; identical to SEQ ID NO: 16669
  source 1..80: mol_type = other DNA

SEQ ID NO: 84463 - DNA, 80 bp, synthetic construct; identical to SEQ ID NO: 51341
  source 1..80: mol_type = other DNA

SEQ ID NO: 84464 - DNA, 80 bp, synthetic construct; identical to SEQ ID NO: 51342
  source 1..80: mol_type = other DNA

SEQ ID NO: 84465 - DNA, 80 bp, synthetic construct; identical to SEQ ID NO: 16670
  source 1..80: mol_type = other DNA

SEQ ID NO: 84466 - DNA, 80 bp, synthetic construct; identical to SEQ ID NO: 51344
  source 1..80: mol_type = other DNA

SEQ ID NO: 84467 - DNA, 80 bp, synthetic construct; identical to SEQ ID NO: 51345
  source 1..80: mol_type = other DNA

SEQ ID NO: 84468 - DNA, 80 bp, synthetic construct; identical to SEQ ID NO: 51346
  source 1..80: mol_type = other DNA

SEQ ID NO: 84469 - DNA, 80 bp, synthetic construct; identical to SEQ ID NO: 51348
  source 1..80: mol_type = other DNA

SEQ ID NO: 84470 - DNA, 80 bp, synthetic construct; identical to SEQ ID NO: 51349
  source 1..80: mol_type = other DNA

SEQ ID NO: 84471 - DNA, 80 bp, synthetic construct; identical to SEQ ID NO: 51350
  source 1..80: mol_type = other DNA

SEQ ID NO: 84472 - DNA, 80 bp, synthetic construct; identical to SEQ ID NO: 16672
  source 1..80: mol_type = other DNA

SEQ ID NO: 84473 - DNA, 80 bp, synthetic construct; identical to SEQ ID NO: 51352
  source 1..80: mol_type = other DNA

SEQ ID NO: 84474 - DNA, 80 bp, synthetic construct; identical to SEQ ID NO: 51353
  source 1..80: mol_type = other DNA

SEQ ID NO: 84475 - DNA, 80 bp, synthetic construct; identical to SEQ ID NO: 16673
  source 1..80: mol_type = other DNA

SEQ ID NO: 84476 - DNA, 80 bp, synthetic construct; identical to SEQ ID NO: 51355
  source 1..80: mol_type = other DNA

SEQ ID NO: 84477 - DNA, 80 bp, synthetic construct; identical to SEQ ID NO: 51356
  source 1..80: mol_type = other DNA

SEQ ID NO: 84478 - DNA, 80 bp, synthetic construct; identical to SEQ ID NO: 51357
  source 1..80: mol_type = other DNA

SEQ ID NO: 84479 - DNA, 80 bp, synthetic construct; identical to SEQ ID NO: 16674
  source 1..80: mol_type = other DNA

SEQ ID NO: 84480 - DNA, 80 bp, synthetic construct; identical to SEQ ID NO: 51359
  source 1..80: mol_type = other DNA

SEQ ID NO: 84481 - DNA, 80 bp, synthetic construct; identical to SEQ ID NO: 51360
  source 1..80: mol_type = other DNA

SEQ ID NO: 84482 - DNA, 80 bp, synthetic construct; identical to SEQ ID NO: 51361
  source 1..80: mol_type = other DNA

SEQ ID NO: 84483 - DNA, 80 bp, synthetic construct; identical to SEQ ID NO: 51362
  source 1..80: mol_type = other DNA

SEQ ID NO: 84484 - DNA, 80 bp, synthetic construct; identical to SEQ ID NO: 16675
  source 1..80: mol_type = other DNA

SEQ ID NO: 84485 - DNA, 80 bp, synthetic construct; identical to SEQ ID NO: 51364
  source 1..80: mol_type = other DNA

SEQ ID NO: 84486 - DNA, 80 bp, synthetic construct; identical to SEQ ID NO: 51365
  source 1..80: mol_type = other DNA

SEQ ID NO: 84487 - DNA, 80 bp, synthetic construct; identical to SEQ ID NO: 51366
  source 1..80: mol_type = other DNA

SEQ ID NO: 84488 - DNA, 80 bp, synthetic construct; identical to SEQ ID NO: 16676
  source 1..80: mol_type = other DNA

SEQ ID NO: 84489 - DNA, 80 bp, synthetic construct; identical to SEQ ID NO: 51368
  source 1..80: mol_type = other DNA

SEQ ID NO: 84490 - DNA, 80 bp, synthetic construct; identical to SEQ ID NO: 51369
  source 1..80: mol_type = other DNA

SEQ ID NO: 84491 - DNA, 80 bp, synthetic construct; identical to SEQ ID NO: 16677
  source 1..80: mol_type = other DNA

SEQ ID NO: 84492 - DNA, 80 bp, synthetic construct; identical to SEQ ID NO: 51371
  source 1..80: mol_type = other DNA

SEQ ID NO: 84493 - DNA, 80 bp, synthetic construct; identical to SEQ ID NO: 51372
  source 1..80: mol_type = other DNA

SEQ ID NO: 84494 - DNA, 80 bp, synthetic construct; identical to SEQ ID NO: 16678
  source 1..80: mol_type = other DNA

SEQ ID NO: 84495 - DNA, 80 bp, synthetic construct; identical to SEQ ID NO: 51375
  source 1..80: mol_type = other DNA

SEQ ID NO: 84496 - DNA, 80 bp, synthetic construct; identical to SEQ ID NO: 51376
  source 1..80: mol_type = other DNA

SEQ ID NO: 84497 - DNA, 80 bp, synthetic construct; identical to SEQ ID NO: 51377
  source 1..80: mol_type = other DNA

SEQ ID NO: 84498 - DNA, 80 bp, synthetic construct; identical to SEQ ID NO: 16679
  source 1..80: mol_type = other DNA

SEQ ID NO: 84499 - DNA, 80 bp, synthetic construct; identical to SEQ ID NO: 51379
  source 1..80: mol_type = other DNA

SEQ ID NO: 84500 - DNA, 80 bp, synthetic construct; identical to SEQ ID NO: 51380
  source 1..80: mol_type = other DNA

SEQ ID NO: 84501 - DNA, 80 bp, synthetic construct; identical to SEQ ID NO: 51381
  source 1..80: mol_type = other DNA

SEQ ID NO: 84502 - DNA, 80 bp, synthetic construct; identical to SEQ ID NO: 16680
  source 1..80: mol_type = other DNA

SEQ ID NO: 84503 - DNA, 80 bp, synthetic construct; identical to SEQ ID NO: 51383
  source 1..80: mol_type = other DNA

SEQ ID NO: 84504 - DNA, 80 bp, synthetic construct; identical to SEQ ID NO: 51384
  source 1..80: mol_type = other DNA

SEQ ID NO: 84505 - DNA, 80 bp, synthetic construct; identical to SEQ ID NO: 51385
  source 1..80: mol_type = other DNA

SEQ ID NO: 84506 - DNA, 80 bp, synthetic construct; identical to SEQ ID NO: 16681
  source 1..80: mol_type = other DNA

SEQ ID NO: 84507 - DNA, 80 bp, synthetic construct; identical to SEQ ID NO: 51387
  source 1..80: mol_type = other DNA

SEQ ID NO: 84508 - DNA, 80 bp, synthetic construct; identical to SEQ ID NO: 51388
  source 1..80: mol_type = other DNA

SEQ ID NO: 84509 - DNA, 80 bp, synthetic construct; identical to SEQ ID NO: 51389
  source 1..80: mol_type = other DNA

SEQ ID NO: 84510 - DNA, 80 bp, synthetic construct; identical to SEQ ID NO: 16682
  source 1..80: mol_type = other DNA

SEQ ID NO: 84511 - DNA, 80 bp, synthetic construct; identical to SEQ ID NO: 51391
  source 1..80: mol_type = other DNA

SEQ ID NO: 84512 - DNA, 80 bp, synthetic construct; identical to SEQ ID NO: 51392
  source 1..80: mol_type = other DNA

SEQ ID NO: 84513 - DNA, 80 bp, synthetic construct; identical to SEQ ID NO: 51393
  source 1..80: mol_type = other DNA

SEQ ID NO: 84514 - DNA, 80 bp, synthetic construct; identical to SEQ ID NO: 16683
  source 1..80: mol_type = other DNA

SEQ ID NO: 84515 - DNA, 80 bp, synthetic construct; identical to SEQ ID NO: 51395
  source 1..80: mol_type = other DNA

SEQ ID NO: 84516 - DNA, 80 bp, synthetic construct; identical to SEQ ID NO: 51396
  source 1..80: mol_type = other DNA

SEQ ID NO: 84517 - DNA, 80 bp, synthetic construct; identical to SEQ ID NO: 51397
  source 1..80: mol_type = other DNA

SEQ ID NO: 84518 - DNA, 80 bp, synthetic construct; identical to SEQ ID NO: 16684
  source 1..80: mol_type = other DNA

SEQ ID NO: 84519 - DNA, 80 bp, synthetic construct; identical to SEQ ID NO: 51399
  source 1..80: mol_type = other DNA

SEQ ID NO: 84520 - DNA, 80 bp, synthetic construct; identical to SEQ ID NO: 51400
  source 1..80: mol_type = other DNA

SEQ ID NO: 84521 - DNA, 80 bp, synthetic construct; identical to SEQ ID NO: 51401
  source 1..80: mol_type = other DNA

SEQ ID NO: 84522 - DNA, 80 bp, synthetic construct; identical to SEQ ID NO: 16685
  source 1..80: mol_type = other DNA

SEQ ID NO: 84523 - DNA, 80 bp, synthetic construct; identical to SEQ ID NO: 51403
  source 1..80: mol_type = other DNA

SEQ ID NO: 84524 - DNA, 80 bp, synthetic construct; identical to SEQ ID NO: 51404
  source 1..80: mol_type = other DNA

SEQ ID NO: 84525 - DNA, 80 bp, synthetic construct; identical to SEQ ID NO: 51405
  source 1..80: mol_type = other DNA

SEQ ID NO: 84526 - DNA, 80 bp, synthetic construct; identical to SEQ ID NO: 16686
  source 1..80: mol_type = other DNA

SEQ ID NO: 84527 - DNA, 80 bp, synthetic construct; identical to SEQ ID NO: 51407
  source 1..80: mol_type = other DNA

SEQ ID NO: 84528 - DNA, 80 bp, synthetic construct; identical to SEQ ID NO: 51408
  source 1..80: mol_type = other DNA

SEQ ID NO: 84529 - DNA, 80 bp, synthetic construct; identical to SEQ ID NO: 51409
  source 1..80: mol_type = other DNA

SEQ ID NO: 84530 - DNA, 80 bp, synthetic construct; identical to SEQ ID NO: 16687
  source 1..80: mol_type = other DNA

SEQ ID NO: 84531 - DNA, 80 bp, synthetic construct; identical to SEQ ID NO: 51411
  source 1..80: mol_type = other DNA

SEQ ID NO: 84532 - DNA, 80 bp, synthetic construct; identical to SEQ ID NO: 51412
  source 1..80: mol_type = other DNA

SEQ ID NO: 84533 - DNA, 80 bp, synthetic construct; identical to SEQ ID NO: 51413
  source 1..80: mol_type = other DNA

SEQ ID NO: 84534 - DNA, 80 bp, synthetic construct; identical to SEQ ID NO: 51414
  source 1..80: mol_type = other DNA

SEQ ID NO: 84535 - DNA, 80 bp, synthetic construct; identical to SEQ ID NO: 16688
  source 1..80: mol_type = other DNA

SEQ ID NO: 84536 - DNA, 80 bp, synthetic construct; identical to SEQ ID NO: 51416
  source 1..80: mol_type = other DNA

SEQ ID NO: 84537 - DNA, 80 bp, synthetic construct; identical to SEQ ID NO: 51417
  source 1..80: mol_type = other DNA

SEQ ID NO: 84538 - DNA, 80 bp, synthetic construct; identical to SEQ ID NO: 16689
  source 1..80: mol_type = other DNA

SEQ ID NO: 84539 - DNA, 80 bp, synthetic construct; identical to SEQ ID NO: 51419
  source 1..80: mol_type = other DNA

SEQ ID NO: 84540 - DNA, 80 bp, synthetic construct; identical to SEQ ID NO: 51420
  source 1..80: mol_type = other DNA

SEQ ID NO: 84541 - DNA, 80 bp, synthetic construct; identical to SEQ ID NO: 51421
  source 1..80: mol_type = other DNA

SEQ ID NO: 84542 - DNA, 80 bp, synthetic construct; identical to SEQ ID NO: 16690
  source 1..80: mol_type = other DNA

SEQ ID NO: 84543 - DNA, 80 bp, synthetic construct; identical to SEQ ID NO: 51423
  source 1..80: mol_type = other DNA

SEQ ID NO: 84544 - DNA, 80 bp, synthetic construct; identical to SEQ ID NO: 51424
  source 1..80: mol_type = other DNA

SEQ ID NO: 84545 - DNA, 80 bp, synthetic construct; identical to SEQ ID NO: 51425
  source 1..80: mol_type = other DNA

SEQ ID NO: 84546 - DNA, 80 bp, synthetic construct; identical to SEQ ID NO: 51426
  source 1..80: mol_type = other DNA

SEQ ID NO: 84547 - DNA, 80 bp, synthetic construct; identical to SEQ ID NO: 16691
  source 1..80: mol_type = other DNA

SEQ ID NO: 84548 - DNA, 80 bp, synthetic construct; identical to SEQ ID NO: 51428
  source 1..80: mol_type = other DNA

SEQ ID NO: 84549 - DNA, 80 bp, synthetic construct; identical to SEQ ID NO: 51429
  source 1..80: mol_type = other DNA

SEQ ID NO: 84550 - DNA, 80 bp, synthetic construct; identical to SEQ ID NO: 51430
  source 1..80: mol_type = other DNA

SEQ ID NO: 84551 - DNA, 80 bp, synthetic construct; identical to SEQ ID NO: 51432
  source 1..80: mol_type = other DNA

SEQ ID NO: 84552 - DNA, 80 bp, synthetic construct; identical to SEQ ID NO: 16693
  source 1..80: mol_type = other DNA

SEQ ID NO: 84553 - DNA, 80 bp, synthetic construct; identical to SEQ ID NO: 51436
  source 1..80: mol_type = other DNA

SEQ ID NO: 84554 - DNA, 80 bp, synthetic construct; identical to SEQ ID NO: 51437
  source 1..80: mol_type = other DNA

SEQ ID NO: 84555 - DNA, 80 bp, synthetic construct; identical to SEQ ID NO: 16694
  source 1..80: mol_type = other DNA

SEQ ID NO: 84556 - DNA, 80 bp, synthetic construct; identical to SEQ ID NO: 51440
  source 1..80: mol_type = other DNA

SEQ ID NO: 84557 - DNA, 80 bp, synthetic construct; identical to SEQ ID NO: 51441
  source 1..80: mol_type = other DNA

SEQ ID NO: 84558 - DNA, 80 bp, synthetic construct; identical to SEQ ID NO: 16695
  source 1..80: mol_type = other DNA

SEQ ID NO: 84559 - DNA, 80 bp, synthetic construct; identical to SEQ ID NO: 51443
  source 1..80: mol_type = other DNA

SEQ ID NO: 84560 - DNA, 80 bp, synthetic construct; identical to SEQ ID NO: 51444
  source 1..80: mol_type = other DNA

SEQ ID NO: 84561 - DNA, 80 bp, synthetic construct; identical to SEQ ID NO: 51445
  source 1..80: mol_type = other DNA

SEQ ID NO: 84562 - DNA, 80 bp, synthetic construct; identical to SEQ ID NO: 16696
  source 1..80: mol_type = other DNA

SEQ ID NO: 84563 - DNA, 80 bp, synthetic construct; identical to SEQ ID NO: 51447
  source 1..80: mol_type = other DNA

SEQ ID NO: 84564 - DNA, 80 bp, synthetic construct; identical to SEQ ID NO: 51448
  source 1..80: mol_type = other DNA

SEQ ID NO: 84565 - DNA, 80 bp, synthetic construct; identical to SEQ ID NO: 51449
  source 1..80: mol_type = other DNA

SEQ ID NO: 84566 - DNA, 80 bp, synthetic construct; identical to SEQ ID NO: 51450
  source 1..80: mol_type = other DNA

SEQ ID NO: 84567 - DNA, 80 bp, synthetic construct; identical to SEQ ID NO: 16697
  source 1..80: mol_type = other DNA

SEQ ID NO: 84568 - DNA, 80 bp, synthetic construct; identical to SEQ ID NO: 51452
  source 1..80: mol_type = other DNA

SEQ ID NO: 84569 - DNA, 80 bp, synthetic construct; identical to SEQ ID NO: 51453
  source 1..80: mol_type = other DNA

SEQ ID NO: 84570 - DNA, 80 bp, synthetic construct; identical to SEQ ID NO: 16698
  source 1..80: mol_type = other DNA

SEQ ID NO: 84571 - DNA, 80 bp, synthetic construct; identical to SEQ ID NO: 51455
  source 1..80: mol_type = other DNA

SEQ ID NO: 84572 - DNA, 80 bp, synthetic construct; identical to SEQ ID NO: 51456
  source 1..80: mol_type = other DNA

SEQ ID NO: 84573 - DNA, 80 bp, synthetic construct; identical to SEQ ID NO: 51457
  source 1..80: mol_type = other DNA

SEQ ID NO: 84574 - DNA, 80 bp, synthetic construct; identical to SEQ ID NO: 51458
  source 1..80: mol_type = other DNA

SEQ ID NO: 84575 - DNA, 80 bp, synthetic construct; identical to SEQ ID NO: 16699
  source 1..80: mol_type = other DNA

SEQ ID NO: 84576 - DNA, 80 bp, synthetic construct; identical to SEQ ID NO: 51460
  source 1..80: mol_type = other DNA

SEQ ID NO: 84577 - DNA, 80 bp, synthetic construct; identical to SEQ ID NO: 51461
  source 1..80: mol_type = other DNA

SEQ ID NO: 84578 - DNA, 80 bp, synthetic construct; identical to SEQ ID NO: 16700
  source 1..80: mol_type = other DNA

SEQ ID NO: 84579 - DNA, 80 bp, synthetic construct; identical to SEQ ID NO: 51463
  source 1..80: mol_type = other DNA

SEQ ID NO: 84580 - DNA, 80 bp, synthetic construct; identical to SEQ ID NO: 51464
  source 1..80: mol_type = other DNA

SEQ ID NO: 84581 - DNA, 80 bp, synthetic construct; identical to SEQ ID NO: 51465
  source 1..80: mol_type = other DNA

SEQ ID NO: 84582 - DNA, 80 bp, synthetic construct; identical to SEQ ID NO: 16701
  source 1..80: mol_type = other DNA

SEQ ID NO: 84583 - DNA, 80 bp, synthetic construct; identical to SEQ ID NO: 51468
  source 1..80: mol_type = other DNA

SEQ ID NO: 84584 - DNA, 80 bp, synthetic construct; identical to SEQ ID NO: 51469
  source 1..80: mol_type = other DNA

SEQ ID NO: 84585 - DNA, 80 bp, synthetic construct; identical to SEQ ID NO: 16702
  source 1..80: mol_type = other DNA

SEQ ID NO: 84586 - DNA, 80 bp, synthetic construct; identical to SEQ ID NO: 51471
  source 1..80: mol_type = other DNA

SEQ ID NO: 84587 - DNA, 80 bp, synthetic construct; identical to SEQ ID NO: 51472
  source 1..80: mol_type = other DNA

SEQ ID NO: 84588 - DNA, 80 bp, synthetic construct; identical to SEQ ID NO: 51473
  source 1..80: mol_type = other DNA

SEQ ID NO: 84589 - DNA, 80 bp, synthetic construct; identical to SEQ ID NO: 51474
  source 1..80: mol_type = other DNA

SEQ ID NO: 84590 - DNA, 80 bp, synthetic construct; identical to SEQ ID NO: 16703
  source 1..80: mol_type = other DNA

SEQ ID NO: 84591 - DNA, 80 bp, synthetic construct; identical to SEQ ID NO: 51476
  source 1..80: mol_type = other DNA

SEQ ID NO: 84592 - DNA, 80 bp, synthetic construct; identical to SEQ ID NO: 51477
  source 1..80: mol_type = other DNA

SEQ ID NO: 84593 - DNA, 80 bp, synthetic construct; identical to SEQ ID NO: 16704
  source 1..80: mol_type = other DNA

SEQ ID NO: 84594 - DNA, 80 bp, synthetic construct; identical to SEQ ID NO: 51479
  source 1..80: mol_type = other DNA

SEQ ID NO: 84595 - DNA, 80 bp, synthetic construct; identical to SEQ ID NO: 51480
  source 1..80: mol_type = other DNA

SEQ ID NO: 84596 - DNA, 80 bp, synthetic construct; identical to SEQ ID NO: 51481
  source 1..80: mol_type = other DNA

SEQ ID NO: 84597 - DNA, 80 bp, synthetic construct; identical to SEQ ID NO: 16705
  source 1..80: mol_type = other DNA

SEQ ID NO: 84598 - DNA, 80 bp, synthetic construct; identical to SEQ ID NO: 51483
  source 1..80: mol_type = other DNA

SEQ ID NO: 84599 - DNA, 80 bp, synthetic construct; identical to SEQ ID NO: 51484
  source 1..80: mol_type = other DNA

SEQ ID NO: 84600 - DNA, 80 bp, synthetic construct; identical to SEQ ID NO: 51485
  source 1..80: mol_type = other DNA

SEQ ID NO: 84601 - DNA, 80 bp, synthetic construct; identical to SEQ ID NO: 16706
  source 1..80: mol_type = other DNA

SEQ ID NO: 84602 - DNA, 80 bp, synthetic construct; identical to SEQ ID NO: 51487
  source 1..80: mol_type = other DNA

SEQ ID NO: 84603 - DNA, 80 bp, synthetic construct; identical to SEQ ID NO: 51488
  source 1..80: mol_type = other DNA

SEQ ID NO: 84604 - DNA, 80 bp, synthetic construct; identical to SEQ ID NO: 51489
  source 1..80: mol_type = other DNA

SEQ ID NO: 84605 - DNA, 80 bp, synthetic construct; identical to SEQ ID NO: 51490
  source 1..80: mol_type = other DNA

SEQ ID NO: 84606 - DNA, 80 bp, synthetic construct; identical to SEQ ID NO: 16707
  source 1..80: mol_type = other DNA

SEQ ID NO: 84607 - DNA, 80 bp, synthetic construct; identical to SEQ ID NO: 51492
  source 1..80: mol_type = other DNA

SEQ ID NO: 84608 - DNA, 80 bp, synthetic construct; identical to SEQ ID NO: 51493
  source 1..80: mol_type = other DNA

SEQ ID NO: 84609 - DNA, 80 bp, synthetic construct; identical to SEQ ID NO: 16708
  source 1..80: mol_type = other DNA

SEQ ID NO: 84610 - DNA, 80 bp, synthetic construct; identical to SEQ ID NO: 51495
  source 1..80: mol_type = other DNA

SEQ ID NO: 84611 - DNA, 80 bp, synthetic construct; identical to SEQ ID NO: 51496
  source 1..80: mol_type = other DNA

SEQ ID NO: 84612 - DNA, 80 bp, synthetic construct; identical to SEQ ID NO: 51497
  source 1..80: mol_type = other DNA

SEQ ID NO: 84613 - DNA, 80 bp, synthetic construct; identical to SEQ ID NO: 16709
  source 1..80: mol_type = other DNA

SEQ ID NO: 84614 - DNA, 80 bp, synthetic construct; identical to SEQ ID NO: 51499
  source 1..80: mol_type = other DNA

SEQ ID NO: 84615 - DNA, 80 bp, synthetic construct; identical to SEQ ID NO: 51500
  source 1..80: mol_type = other DNA

SEQ ID NO: 84616 - DNA, 80 bp, synthetic construct; identical to SEQ ID NO: 51501
  source 1..80: mol_type = other DNA

SEQ ID NO: 84617 - DNA, 80 bp, synthetic construct; identical to SEQ ID NO: 16710
  source 1..80: mol_type = other DNA

SEQ ID NO: 84618 - DNA, 80 bp, synthetic construct; identical to SEQ ID NO: 51503
  source 1..80: mol_type = other DNA

SEQ ID NO: 84619 - DNA, 80 bp, synthetic construct; identical to SEQ ID NO: 51504
  source 1..80: mol_type = other DNA

SEQ ID NO: 84620 - DNA, 80 bp, synthetic construct; identical to SEQ ID NO: 51505
  source 1..80: mol_type = other DNA

SEQ ID NO: 84621 - DNA, 80 bp, synthetic construct; identical to SEQ ID NO: 16711
  source 1..80: mol_type = other DNA

SEQ ID NO: 84622 - DNA, 80 bp, synthetic construct; identical to SEQ ID NO: 51508
  source 1..80: mol_type = other DNA

SEQ ID NO: 84623 - DNA, 80 bp, synthetic construct; identical to SEQ ID NO: 51509
  source 1..80: mol_type = other DNA

SEQ ID NO: 84624 - DNA, 80 bp, synthetic construct; identical to SEQ ID NO: 51510
  source 1..80: mol_type = other DNA

SEQ ID NO: 84625 - DNA, 80 bp, synthetic construct; identical to SEQ ID NO: 16712
  source 1..80: mol_type = other DNA

SEQ ID NO: 84626 - DNA, 80 bp, synthetic construct; identical to SEQ ID NO: 51512
  source 1..80: mol_type = other DNA

SEQ ID NO: 84627 - DNA, 80 bp, synthetic construct; identical to SEQ ID NO: 51513
  source 1..80: mol_type = other DNA

SEQ ID NO: 84628 - DNA, 80 bp, synthetic construct; identical to SEQ ID NO: 51514
  source 1..80: mol_type = other DNA

SEQ ID NO: 84629 - DNA, 80 bp, synthetic construct; identical to SEQ ID NO: 16713
  source 1..80: mol_type = other DNA

SEQ ID NO: 84630 - DNA, 80 bp, synthetic construct; identical to SEQ ID NO: 51516
  source 1..80: mol_type = other DNA

SEQ ID NO: 84631 - DNA, 80 bp, synthetic construct; identical to SEQ ID NO: 51517
  source 1..80: mol_type = other DNA

SEQ ID NO: 84632 - DNA, 80 bp, synthetic construct; identical to SEQ ID NO: 51518
  source 1..80: mol_type = other DNA

SEQ ID NO: 84633 - DNA, 80 bp, synthetic construct; identical to SEQ ID NO: 16714
  source 1..80: mol_type = other DNA

SEQ ID NO: 84634 - DNA, 80 bp, synthetic construct; identical to SEQ ID NO: 51520
  source 1..80: mol_type = other DNA

SEQ ID NO: 84635 - DNA, 80 bp, synthetic construct; identical to SEQ ID NO: 51521
  source 1..80: mol_type = other DNA

SEQ ID NO: 84636 - DNA, 80 bp, synthetic construct; identical to SEQ ID NO: 16715
  source 1..80: mol_type = other DNA

SEQ ID NO: 84637 - DNA, 80 bp, synthetic construct; identical to SEQ ID NO: 51523
  source 1..80: mol_type = other DNA

SEQ ID NO: 84638 - DNA, 80 bp, synthetic construct; identical to SEQ ID NO: 51524
  source 1..80: mol_type = other DNA

SEQ ID NO: 84639 - DNA, 80 bp, synthetic construct; identical to SEQ ID NO: 51525
  source 1..80: mol_type = other DNA

SEQ ID NO: 84640 - DNA, 80 bp, synthetic construct; identical to SEQ ID NO: 51526
  source 1..80: mol_type = other DNA

SEQ ID NO: 84641 - DNA, 80 bp, synthetic construct; identical to SEQ ID NO: 16716
  source 1..80: mol_type = other DNA

SEQ ID NO: 84642 - DNA, 80 bp, synthetic construct; identical to SEQ ID NO: 51528
  source 1..80: mol_type = other DNA

SEQ ID NO: 84643 - DNA, 80 bp, synthetic construct; identical to SEQ ID NO: 51529
  source 1..80: mol_type = other DNA

SEQ ID NO: 84644 - DNA, 80 bp, synthetic construct; identical to SEQ ID NO: 16717
  source 1..80: mol_type = other DNA

SEQ ID NO: 84645 - DNA, 80 bp, synthetic construct; identical to SEQ ID NO: 51531
  source 1..80: mol_type = other DNA

SEQ ID NO: 84646 - DNA, 80 bp, synthetic construct; identical to SEQ ID NO: 51532
  source 1..80: mol_type = other DNA

SEQ ID NO: 84647 - DNA, 80 bp, synthetic construct; identical to SEQ ID NO: 51533
  source 1..80: mol_type = other DNA

SEQ ID NO: 84648 - DNA, 80 bp, synthetic construct; identical to SEQ ID NO: 16718
  source 1..80: mol_type = other DNA

SEQ ID NO: 84649 - DNA, 80 bp, synthetic construct; identical to SEQ ID NO: 51535
  source 1..80: mol_type = other DNA

SEQ ID NO: 84650 - DNA, 80 bp, synthetic construct; identical to SEQ ID NO: 51536
  source 1..80: mol_type = other DNA

SEQ ID NO: 84651 - DNA, 80 bp, synthetic construct; identical to SEQ ID NO: 51537
  source 1..80: mol_type = other DNA

SEQ ID NO: 84652 - DNA, 80 bp, synthetic construct; identical to SEQ ID NO: 51538
  source 1..80: mol_type = other DNA

SEQ ID NO: 84653 - DNA, 80 bp, synthetic construct; identical to SEQ ID NO: 16719
  source 1..80: mol_type = other DNA

SEQ ID NO: 84654 - DNA, 80 bp, synthetic construct; identical to SEQ ID NO: 51540
  source 1..80: mol_type = other DNA

SEQ ID NO: 84655 - DNA, 80 bp, synthetic construct; identical to SEQ ID NO: 51541
  source 1..80: mol_type = other DNA

SEQ ID NO: 84656 - DNA, 80 bp, synthetic construct; identical to SEQ ID NO: 16720
  source 1..80: mol_type = other DNA

SEQ ID NO: 84657 - DNA, 80 bp, synthetic construct; identical to SEQ ID NO: 51543
  source 1..80: mol_type = other DNA

SEQ ID NO: 84658 - DNA, 80 bp, synthetic construct; identical to SEQ ID NO: 51544
  source 1..80: mol_type = other DNA

SEQ ID NO: 84659 - DNA, 80 bp, synthetic construct; identical to SEQ ID NO: 51545
  source 1..80: mol_type = other DNA

SEQ ID NO: 84660 - DNA, 80 bp, synthetic construct; identical to SEQ ID NO: 16721
  source 1..80: mol_type = other DNA

SEQ ID NO: 84661 - DNA, 80 bp, synthetic construct; identical to SEQ ID NO: 51547
  source 1..80: mol_type = other DNA

SEQ ID NO: 84662 - DNA, 80 bp, synthetic construct; identical to SEQ ID NO: 51548
  source 1..80: mol_type = other DNA

SEQ ID NO: 84663 - DNA, 80 bp, synthetic construct; identical to SEQ ID NO: 51549
  source 1..80: mol_type = other DNA

SEQ ID NO: 84664 - DNA, 80 bp, synthetic construct; identical to SEQ ID NO: 16722
  source 1..80: mol_type = other DNA

SEQ ID NO: 84665 - DNA, 80 bp, synthetic construct; identical to SEQ ID NO: 51552
  source 1..80: mol_type = other DNA

SEQ ID NO: 84666 - DNA, 80 bp, synthetic construct; identical to SEQ ID NO: 51553
  source 1..80: mol_type = other DNA

SEQ ID NO: 84667 - DNA, 80 bp, synthetic construct; identical to SEQ ID NO: 16723
  source 1..80: mol_type = other DNA

SEQ ID NO: 84668 - DNA, 80 bp, synthetic construct; identical to SEQ ID NO: 51555
  source 1..80: mol_type = other DNA

SEQ ID NO: 84669 - DNA, 80 bp, synthetic construct; identical to SEQ ID NO: 51556
  source 1..80: mol_type = other DNA

SEQ ID NO: 84670 - DNA, 80 bp, synthetic construct; identical to SEQ ID NO: 51557
  source 1..80: mol_type = other DNA

SEQ ID NO: 84671 - DNA, 80 bp, synthetic construct; identical to SEQ ID NO: 16724
  source 1..80: mol_type = other DNA

SEQ ID NO: 84672 - DNA, 80 bp, synthetic construct; identical to SEQ ID NO: 51559
  source 1..80: mol_type = other DNA

SEQ ID NO: 84673 - DNA, 80 bp, synthetic construct; identical to SEQ ID NO: 51560
  source 1..80: mol_type = other DNA

SEQ ID NO: 84674 - DNA, 80 bp, synthetic construct; identical to SEQ ID NO: 51561
  source 1..80: mol_type = other DNA

SEQ ID NO: 84675 - DNA, 80 bp, synthetic construct; identical to SEQ ID NO: 16725
  source 1..80: mol_type = other DNA

SEQ ID NO: 84676 - DNA, 80 bp, synthetic construct; identical to SEQ ID NO: 51563
  source 1..80: mol_type = other DNA

SEQ ID NO: 84677 - DNA, 80 bp, synthetic construct; identical to SEQ ID NO: 51564
  source 1..80: mol_type = other DNA

SEQ ID NO: 84678 - DNA, 80 bp, synthetic construct; identical to SEQ ID NO: 51565
  source 1..80: mol_type = other DNA

SEQ ID NO: 84679 - DNA, 80 bp, synthetic construct; identical to SEQ ID NO: 16726
  source 1..80: mol_type = other DNA

SEQ ID NO: 84680 - DNA, 80 bp, synthetic construct; identical to SEQ ID NO: 51567
  source 1..80: mol_type = other DNA

SEQ ID NO: 84681 - DNA, 80 bp, synthetic construct; identical to SEQ ID NO: 51568
  source 1..80: mol_type = other DNA

SEQ ID NO: 84682 - DNA, 80 bp, synthetic construct; identical to SEQ ID NO: 51569
  source 1..80: mol_type = other DNA

SEQ ID NO: 84683 - DNA, 80 bp, synthetic construct; identical to SEQ ID NO: 51570
  source 1..80: mol_type = other DNA

SEQ ID NO: 84684 - DNA, 80 bp, synthetic construct; identical to SEQ ID NO: 16727
  source 1..80: mol_type = other DNA

SEQ ID NO: 84685 - DNA, 80 bp, synthetic construct; identical to SEQ ID NO: 51572
  source 1..80: mol_type = other DNA

SEQ ID NO: 84686 - DNA, 80 bp, synthetic construct; identical to SEQ ID NO: 51573
  source 1..80: mol_type = other DNA

SEQ ID NO: 84687 - DNA, 80 bp, synthetic construct; identical to SEQ ID NO: 51574
  source 1..80: mol_type = other DNA

SEQ ID NO: 84688 - DNA, 80 bp, synthetic construct; identical to SEQ ID NO: 16728
  source 1..80: mol_type = other DNA

SEQ ID NO: 84689 - DNA, 80 bp, synthetic construct; identical to SEQ ID NO: 51576
  source 1..80: mol_type = other DNA

SEQ ID NO: 84690 - DNA, 80 bp, synthetic construct; identical to SEQ ID NO: 51577
  source 1..80: mol_type = other DNA

SEQ ID NO: 84691 - DNA, 80 bp, synthetic construct; identical to SEQ ID NO: 51578
  source 1..80: mol_type = other DNA

SEQ ID NO: 84692 - DNA, 80 bp, synthetic construct; identical to SEQ ID NO: 51579
  source 1..80: mol_type = other DNA

SEQ ID NO: 84693 - DNA, 80 bp, synthetic construct; identical to SEQ ID NO: 16729
  source 1..80: mol_type = other DNA

SEQ ID NO: 84694 - DNA, 80 bp, synthetic construct; identical to SEQ ID NO: 51581
  source 1..80: mol_type = other DNA

SEQ ID NO: 84695 - DNA, 80 bp, synthetic construct; identical to SEQ ID NO: 51582
  source 1..80: mol_type = other DNA

SEQ ID NO: 84696 - DNA, 80 bp, synthetic construct; identical to SEQ ID NO: 16730
  source 1..80: mol_type = other DNA

SEQ ID NO: 84697 - DNA, 80 bp, synthetic construct; identical to SEQ ID NO: 51584
  source 1..80: mol_type = other DNA

SEQ ID NO: 84698 - DNA, 80 bp, synthetic construct; identical to SEQ ID NO: 51585
  source 1..80: mol_type = other DNA

SEQ ID NO: 84699 - DNA, 80 bp, synthetic construct; identical to SEQ ID NO: 16731
  source 1..80: mol_type = other DNA

SEQ ID NO: 84700 - DNA, 80 bp, synthetic construct; identical to SEQ ID NO: 51588
  source 1..80: mol_type = other DNA

SEQ ID NO: 84701 - DNA, 80 bp, synthetic construct; identical to SEQ ID NO: 51589
  source 1..80: mol_type = other DNA

SEQ ID NO: 84702 - DNA, 80 bp, synthetic construct; identical to SEQ ID NO: 51590
  source 1..80: mol_type = other DNA

SEQ ID NO: 84703 - DNA, 80 bp, synthetic construct; identical to SEQ ID NO: 16732
  source 1..80: mol_type = other DNA

SEQ ID NO: 84704 - DNA, 80 bp, synthetic construct; identical to SEQ ID NO: 51592
  source 1..80: mol_type = other DNA

SEQ ID NO: 84705 - DNA, 80 bp, synthetic construct; identical to SEQ ID NO: 51593
  source 1..80: mol_type = other DNA

SEQ ID NO: 84706 - DNA, 80 bp, synthetic construct; identical to SEQ ID NO: 51594
  source 1..80: mol_type = other DNA

SEQ ID NO: 84707 - DNA, 80 bp, synthetic construct; identical to SEQ ID NO: 51595
  source 1..80: mol_type = other DNA

SEQ ID NO: 84708 - DNA, 80 bp, synthetic construct; identical to SEQ ID NO: 16733
  source 1..80: mol_type = other DNA

SEQ ID NO: 84709 - DNA, 80 bp, synthetic construct; identical to SEQ ID NO: 51597
  source 1..80: mol_type = other DNA

SEQ ID NO: 84710 - DNA, 80 bp, synthetic construct; identical to SEQ ID NO: 51598
  source 1..80: mol_type = other DNA

SEQ ID NO: 84711 - DNA, 80 bp, synthetic construct; identical to SEQ ID NO: 51599
  source 1..80: mol_type = other DNA

SEQ ID NO: 84712 - DNA, 80 bp, synthetic construct; identical to SEQ ID NO: 51600
  source 1..80: mol_type = other DNA

SEQ ID NO: 84713 - DNA, 80 bp, synthetic construct; identical to SEQ ID NO: 16734
  source 1..80: mol_type = other DNA

SEQ ID NO: 84714 - DNA, 80 bp, synthetic construct; identical to SEQ ID NO: 51602
  source 1..80: mol_type = other DNA

SEQ ID NO: 84715 - DNA, 80 bp, synthetic construct; identical to SEQ ID NO: 51603
  source 1..80: mol_type = other DNA

SEQ ID NO: 84716 - DNA, 80 bp, synthetic construct; identical to SEQ ID NO: 16735
  source 1..80: mol_type = other DNA

SEQ ID NO: 84717 - DNA, 80 bp, synthetic construct; identical to SEQ ID NO: 51605
  source 1..80: mol_type = other DNA

SEQ ID NO: 84718 - DNA, 80 bp, synthetic construct; identical to SEQ ID NO: 51606
  source 1..80: mol_type = other DNA

SEQ ID NO: 84719 - DNA, 80 bp, synthetic construct; identical to SEQ ID NO: 51607
  source 1..80: mol_type = other DNA

SEQ ID NO: 84720 - DNA, 80 bp, synthetic construct; identical to SEQ ID NO: 51608
  source 1..80: mol_type = other DNA

SEQ ID NO: 84721 - DNA, 80 bp, synthetic construct; identical to SEQ ID NO: 16736
  source 1..80: mol_type = other DNA

SEQ ID NO: 84722 - DNA, 80 bp, synthetic construct; identical to SEQ ID NO: 51610
  source 1..80: mol_type = other DNA

SEQ ID NO: 84723 - DNA, 80 bp, synthetic construct; identical to SEQ ID NO: 51611
  source 1..80: mol_type = other DNA

SEQ ID NO: 84724 - DNA, 80 bp, synthetic construct; identical to SEQ ID NO: 51612
  source 1..80: mol_type = other DNA

SEQ ID NO: 84725 - DNA, 80 bp, synthetic construct; identical to SEQ ID NO: 16737
  source 1..80: mol_type = other DNA

SEQ ID NO: 84726 - DNA, 80 bp, synthetic construct; identical to SEQ ID NO: 51614
  source 1..80: mol_type = other DNA

SEQ ID NO: 84727 - DNA, 80 bp, synthetic construct; identical to SEQ ID NO: 51615
  source 1..80: mol_type = other DNA

SEQ ID NO: 84728 - DNA, 80 bp, synthetic construct; identical to SEQ ID NO: 51616
  source 1..80: mol_type = other DNA

SEQ ID NO: 84729 - DNA, 80 bp, synthetic construct; identical to SEQ ID NO: 16738
  source 1..80: mol_type = other DNA

SEQ ID NO: 84730 - DNA, 80 bp, synthetic construct; identical to SEQ ID NO: 51619
  source 1..80: mol_type = other DNA

SEQ ID NO: 84731 - DNA, 80 bp, synthetic construct; identical to SEQ ID NO: 16739
  source 1..80: mol_type = other DNA

SEQ ID NO: 84732 - DNA, 80 bp, synthetic construct; identical to SEQ ID NO: 51622
  source 1..80: mol_type = other DNA

SEQ ID NO: 84733 - DNA, 80 bp, synthetic construct; identical to SEQ ID NO: 51623
  source 1..80: mol_type = other DNA

SEQ ID NO: 84734 - DNA, 80 bp, synthetic construct; identical to SEQ ID NO: 16740
  source 1..80: mol_type = other DNA

SEQ ID NO: 84735 - DNA, 80 bp, synthetic construct; identical to SEQ ID NO: 51625
  source 1..80: mol_type = other DNA

SEQ ID NO: 84736 - DNA, 80 bp, synthetic construct; identical to SEQ ID NO: 51626
  source 1..80: mol_type = other DNA

SEQ ID NO: 84737 - DNA, 80 bp, synthetic construct; identical to SEQ ID NO: 51628
  source 1..80: mol_type = other DNA

SEQ ID NO: 84738 - DNA, 80 bp, synthetic construct; identical to SEQ ID NO: 16741
  source 1..80: mol_type = other DNA

SEQ ID NO: 84739 - DNA, 80 bp, synthetic construct; identical to SEQ ID NO: 51630
  source 1..80: mol_type = other DNA

SEQ ID NO: 84740 - DNA, 80 bp, synthetic construct; identical to SEQ ID NO: 51631
  source 1..80: mol_type = other DNA

SEQ ID NO: 84741 - DNA, 80 bp, synthetic construct; identical to SEQ ID NO: 16742
  source 1..80: mol_type = other DNA

SEQ ID NO: 84742 - DNA, 80 bp, synthetic construct; identical to SEQ ID NO: 51633
  source 1..80: mol_type = other DNA

SEQ ID NO: 84743 - DNA, 80 bp, synthetic construct; identical to SEQ ID NO: 51634
  source 1..80: mol_type = other DNA

SEQ ID NO: 84744 - DNA, 80 bp, synthetic construct; identical to SEQ ID NO: 51635
  source 1..80: mol_type = other DNA

SEQ ID NO: 84745 - DNA, 80 bp, synthetic construct; identical to SEQ ID NO: 16743
  source 1..80: mol_type = other DNA

SEQ ID NO: 84746 - DNA, 80 bp, synthetic construct; identical to SEQ ID NO: 51637
  source 1..80: mol_type = other DNA

SEQ ID NO: 84747 - DNA, 80 bp, synthetic construct; identical to SEQ ID NO: 51638
  source 1..80: mol_type = other DNA

SEQ ID NO: 84748 - DNA, 80 bp, synthetic construct; identical to SEQ ID NO: 51639
  source 1..80: mol_type = other DNA

SEQ ID NO: 84749 - DNA, 80 bp, synthetic construct; identical to SEQ ID NO: 16744
  source 1..80: mol_type = other DNA

SEQ ID NO: 84750 - DNA, 80 bp, synthetic construct; identical to SEQ ID NO: 51642
  source 1..80: mol_type = other DNA

SEQ ID NO: 84751 - DNA, 80 bp, synthetic construct; identical to SEQ ID NO: 16745
  source 1..80: mol_type = other DNA

SEQ ID NO: 84752 - DNA, 80 bp, synthetic construct; identical to SEQ ID NO: 51645
  source 1..80: mol_type = other DNA

SEQ ID NO: 84753 - DNA, 80 bp, synthetic construct; identical to SEQ ID NO: 51646
  source 1..80: mol_type = other DNA

SEQ ID NO: 84754 - DNA, 80 bp, synthetic construct; identical to SEQ ID NO: 51647
  source 1..80: mol_type = other DNA

SEQ ID NO: 84755 - DNA, 80 bp, synthetic construct; identical to SEQ ID NO: 51649
  source 1..80: mol_type = other DNA

SEQ ID NO: 84756 - DNA, 80 bp, synthetic construct; identical to SEQ ID NO: 51650
  source 1..80: mol_type = other DNA

SEQ ID NO: 84757 - DNA, 80 bp, synthetic construct; identical to SEQ ID NO: 51651
  source 1..80: mol_type = other DNA

SEQ ID NO: 84758 - DNA, 80 bp, synthetic construct; identical to SEQ ID NO: 16747
  source 1..80: mol_type = other DNA

SEQ ID NO: 84759 - DNA, 80 bp, synthetic construct; identical to SEQ ID NO: 51653
  source 1..80: mol_type = other DNA

SEQ ID NO: 84760 - DNA, 80 bp, synthetic construct; identical to SEQ ID NO: 51654
  source 1..80: mol_type = other DNA

SEQ ID NO: 84761 - DNA, 80 bp, synthetic construct; identical to SEQ ID NO: 51655
  source 1..80: mol_type = other DNA

SEQ ID NO: 84762 - DNA, 80 bp, synthetic construct; identical to SEQ ID NO: 16748
  source 1..80: mol_type = other DNA

SEQ ID NO: 84763 - DNA, 80 bp, synthetic construct; identical to SEQ ID NO: 51657
  source 1..80: mol_type = other DNA

SEQ ID NO: 84764 - DNA, 80 bp, synthetic construct; identical to SEQ ID NO: 51658
  source 1..80: mol_type = other DNA

SEQ ID NO: 84765 - DNA, 80 bp, synthetic construct; identical to SEQ ID NO: 51659
  source 1..80: mol_type = other DNA

SEQ ID NO: 84766 - DNA, 80 bp, synthetic construct; identical to SEQ ID NO: 51660
  source 1..80: mol_type = other DNA

SEQ ID NO: 84767 - DNA, 80 bp, synthetic construct; identical to SEQ ID NO: 16749
  source 1..80: mol_type = other DNA

SEQ ID NO: 84768 - DNA, 80 bp, synthetic construct; identical to SEQ ID NO: 51662
  source 1..80: mol_type = other DNA

SEQ ID NO: 84769 - DNA, 80 bp, synthetic construct; identical to SEQ ID NO: 51663
  source 1..80: mol_type = other DNA

SEQ ID NO: 84770 - DNA, 80 bp, synthetic construct; identical to SEQ ID NO: 51664
  source 1..80: mol_type = other DNA

SEQ ID NO: 84771 - DNA, 80 bp, synthetic construct; identical to SEQ ID NO: 16750
  source 1..80: mol_type = other DNA

SEQ ID NO: 84772 - DNA, 80 bp, synthetic construct; identical to SEQ ID NO: 51666
  source 1..80: mol_type = other DNA

SEQ ID NO: 84773 - DNA, 80 bp, synthetic construct; identical to SEQ ID NO: 51667
  source 1..80: mol_type = other DNA

SEQ ID NO: 84774 - DNA, 80 bp, synthetic construct; identical to SEQ ID NO: 16751
  source 1..80: mol_type = other DNA

SEQ ID NO: 84775 - DNA, 80 bp, synthetic construct; identical to SEQ ID NO: 51669
  source 1..80: mol_type = other DNA

SEQ ID NO: 84776 - DNA, 80 bp, synthetic construct; identical to SEQ ID NO: 51670
  source 1..80: mol_type = other DNA

SEQ ID NO: 84777 - DNA, 80 bp, synthetic construct; identical to SEQ ID NO: 51671
  source 1..80: mol_type = other DNA

SEQ ID NO: 84778 - DNA, 80 bp, synthetic construct; identical to SEQ ID NO: 16752
  source 1..80: mol_type = other DNA

SEQ ID NO: 84779 - DNA, 80 bp, synthetic construct; identical to SEQ ID NO: 51673
  source 1..80: mol_type = other DNA

SEQ ID NO: 84780 - DNA, 80 bp, synthetic construct; identical to SEQ ID NO: 51674
  source 1..80: mol_type = other DNA

SEQ ID NO: 84781 - DNA, 80 bp, synthetic construct; identical to SEQ ID NO: 51675
  source 1..80: mol_type = other DNA

SEQ ID NO: 84782 - DNA, 80 bp, synthetic construct; identical to SEQ ID NO: 16753
  source 1..80: mol_type = other DNA

SEQ ID NO: 84783 - DNA, 80 bp, synthetic construct; identical to SEQ ID NO: 51677
  source 1..80: mol_type = other DNA

SEQ ID NO: 84784 - DNA, 80 bp, synthetic construct; identical to SEQ ID NO: 51678
  source 1..80: mol_type = other DNA

SEQ ID NO: 84785 - DNA, 80 bp, synthetic construct; identical to SEQ ID NO: 51679
  source 1..80: mol_type = other DNA

SEQ ID NO: 84786 - DNA, 80 bp, synthetic construct; identical to SEQ ID NO: 16754
  source 1..80: mol_type = other DNA

SEQ ID NO: 84787 - DNA, 80 bp, synthetic construct; identical to SEQ ID NO: 51681
  source 1..80: mol_type = other DNA

SEQ ID NO: 84788 - DNA, 80 bp, synthetic construct; identical to SEQ ID NO: 51682
  source 1..80: mol_type = other DNA

SEQ ID NO: 84789 - DNA, 80 bp, synthetic construct; identical to SEQ ID NO: 51683
  source 1..80: mol_type = other DNA

SEQ ID NO: 84790 - DNA, 80 bp, synthetic construct; identical to SEQ ID NO: 51684
  source 1..80: mol_type = other DNA

SEQ ID NO: 84791 - DNA, 80 bp, synthetic construct; identical to SEQ ID NO: 16755
  source 1..80: mol_type = other DNA

SEQ ID NO: 84792 - DNA, 80 bp, synthetic construct; identical to SEQ ID NO: 51686
  source 1..80: mol_type = other DNA

SEQ ID NO: 84793 - DNA, 80 bp, synthetic construct; identical to SEQ ID NO: 51687
  source 1..80: mol_type = other DNA

SEQ ID NO: 84794 - DNA, 80 bp, synthetic construct; identical to SEQ ID NO: 16756
  source 1..80: mol_type = other DNA

SEQ ID NO: 84795 - DNA, 80 bp, synthetic construct; identical to SEQ ID NO: 51689
  source 1..80: mol_type = other DNA

SEQ ID NO: 84796 - DNA, 80 bp, synthetic construct; identical to SEQ ID NO: 51690
  source 1..80: mol_type = other DNA

SEQ ID NO: 84797 - DNA, 80 bp, synthetic construct; identical to SEQ ID NO: 51691
  source 1..80: mol_type = other DNA

SEQ ID NO: 84798 - DNA, 80 bp, synthetic construct; identical to SEQ ID NO: 16757
  source 1..80: mol_type = other DNA

SEQ ID NO: 84799 - DNA, 80 bp, synthetic construct; identical to SEQ ID NO: 51694
  source 1..80: mol_type = other DNA

SEQ ID NO: 84800 - DNA, 80 bp, synthetic construct; identical to SEQ ID NO: 16758
  source 1..80: mol_type = other DNA

SEQ ID NO: 84801 - DNA, 80 bp, synthetic construct; identical to SEQ ID NO: 51697
  source 1..80: mol_type = other DNA

SEQ ID NO: 84802 - DNA, 80 bp, synthetic construct; identical to SEQ ID NO: 51698
  source 1..80: mol_type = other DNA

SEQ ID NO: 84803 - DNA, 80 bp, synthetic construct; identical to SEQ ID NO: 51700
  source 1..80: mol_type = other DNA

SEQ ID NO: 84804 - DNA, 80 bp, synthetic construct; identical to SEQ ID NO: 16759
  source 1..80: mol_type = other DNA

SEQ ID NO: 84805 - DNA, 80 bp, synthetic construct; identical to SEQ ID NO: 51702
  source 1..80: mol_type = other DNA

SEQ ID NO: 84806 - DNA, 80 bp, synthetic construct; identical to SEQ ID NO: 51703
  source 1..80: mol_type = other DNA

SEQ ID NO: 84807 - DNA, 80 bp, synthetic construct; identical to SEQ ID NO: 51704
  source 1..80: mol_type = other DNA

SEQ ID NO: 84808 - DNA, 80 bp, synthetic construct; identical to SEQ ID NO: 16760
  source 1..80: mol_type = other DNA

SEQ ID NO: 84809 - DNA, 80 bp, synthetic construct; identical to SEQ ID NO: 51706
  source 1..80: mol_type = other DNA

SEQ ID NO: 84810 - DNA, 80 bp, synthetic construct; identical to SEQ ID NO: 51707
  source 1..80: mol_type = other DNA

SEQ ID NO: 84811 - DNA, 80 bp, synthetic construct; identical to SEQ ID NO: 16761
  source 1..80: mol_type = other DNA

SEQ ID NO: 84812 - DNA, 80 bp, synthetic construct; identical to SEQ ID NO: 51710
  source 1..80: mol_type = other DNA

SEQ ID NO: 84813 - DNA, 80 bp, synthetic construct; identical to SEQ ID NO: 51711
  source 1..80: mol_type = other DNA

SEQ ID NO: 84814 - DNA, 80 bp, synthetic construct; identical to SEQ ID NO: 51712
  source 1..80: mol_type = other DNA

SEQ ID NO: 84815 - DNA, 80 bp, synthetic construct; identical to SEQ ID NO: 16762
  source 1..80: mol_type = other DNA

SEQ ID NO: 84816 - DNA, 80 bp, synthetic construct; identical to SEQ ID NO: 51714
  source 1..80: mol_type = other DNA

SEQ ID NO: 84817 - DNA, 80 bp, synthetic construct; identical to SEQ ID NO: 51715
  source 1..80: mol_type = other DNA

SEQ ID NO: 84818 - DNA, 80 bp, synthetic construct; identical to SEQ ID NO: 16763
  source 1..80: mol_type = other DNA

SEQ ID NO: 84819 - DNA, 80 bp, synthetic construct; identical to SEQ ID NO: 51718
  source 1..80: mol_type = other DNA

SEQ ID NO: 84820 - DNA, 80 bp, synthetic construct; identical to SEQ ID NO: 51719
  source 1..80: mol_type = other DNA

SEQ ID NO: 84821 - DNA, 80 bp, synthetic construct; identical to SEQ ID NO: 51720
  source 1..80: mol_type = other DNA

SEQ ID NO: 84822 - DNA, 80 bp, synthetic construct; identical to SEQ ID NO: 16764
  source 1..80: mol_type = other DNA

SEQ ID NO: 84823 - DNA, 80 bp, synthetic construct; identical to SEQ ID NO: 51722
  source 1..80: mol_type = other DNA

SEQ ID NO: 84824 - DNA, 80 bp, synthetic construct; identical to SEQ ID NO: 51723
  source 1..80: mol_type = other DNA

SEQ ID NO: 84825 - DNA, 80 bp, synthetic construct; identical to SEQ ID NO: 16765
  source 1..80: mol_type = other DNA

SEQ ID NO: 84826 - DNA, 80 bp, synthetic construct; identical to SEQ ID NO: 51725
  source 1..80: mol_type = other DNA

SEQ ID NO: 84827 - DNA, 80 bp, synthetic construct; identical to SEQ ID NO: 51727
  source 1..80: mol_type = other DNA

SEQ ID NO: 84828 - DNA, 80 bp, synthetic construct; identical to SEQ ID NO: 16766
  source 1..80: mol_type = other DNA

SEQ ID NO: 84829 - DNA, 80 bp, synthetic construct; identical to SEQ ID NO: 51729
  source 1..80: mol_type = other DNA

SEQ ID NO: 84830 - DNA, 80 bp, synthetic construct; identical to SEQ ID NO: 51730
  source 1..80: mol_type = other DNA

SEQ ID NO: 84831 - DNA, 80 bp, synthetic construct; identical to SEQ ID NO: 51731
  source 1..80: mol_type = other DNA

SEQ ID NO: 84832 - DNA, 80 bp, synthetic construct; identical to SEQ ID NO: 51732
  source 1..80: mol_type = other DNA

SEQ ID NO: 84833 - DNA, 80 bp, synthetic construct; identical to SEQ ID NO: 16767
  source 1..80: mol_type = other DNA

SEQ ID NO: 84834 - DNA, 80 bp, synthetic construct; identical to SEQ ID NO: 51734
  source 1..80: mol_type = other DNA

SEQ ID NO: 84835 - DNA, 80 bp, synthetic construct; identical to SEQ ID NO: 51735
  source 1..80: mol_type = other DNA

SEQ ID NO: 84836 - DNA, 80 bp, synthetic construct; identical to SEQ ID NO: 51736
  source 1..80: mol_type = other DNA

SEQ ID NO: 84837 - DNA, 80 bp, synthetic construct; identical to SEQ ID NO: 16768
  source 1..80: mol_type = other DNA

SEQ ID NO: 84838 - DNA, 80 bp, synthetic construct; identical to SEQ ID NO: 51738
  source 1..80: mol_type = other DNA

SEQ ID NO: 84839 - DNA, 80 bp, synthetic construct; identical to SEQ ID NO: 51739
  source 1..80: mol_type = other DNA

SEQ ID NO: 84840 - DNA, 80 bp, synthetic construct; identical to SEQ ID NO: 51740
  source 1..80: mol_type = other DNA

SEQ ID NO: 84841 - DNA, 80 bp, synthetic construct; identical to SEQ ID NO: 51741
  source 1..80: mol_type = other DNA

SEQ ID NO: 84842 - DNA, 80 bp, synthetic construct; identical to SEQ ID NO: 16769
  source 1..80: mol_type = other DNA

SEQ ID NO: 84843 - DNA, 80 bp, synthetic construct; identical to SEQ ID NO: 51743
  source 1..80: mol_type = other DNA

SEQ ID NO: 84844 - DNA, 80 bp, synthetic construct; identical to SEQ ID NO: 16770
  source 1..80: mol_type = other DNA

SEQ ID NO: 84845 - DNA, 80 bp, synthetic construct; identical to SEQ ID NO: 51745
  source 1..80: mol_type = other DNA

SEQ ID NO: 84846 - DNA, 80 bp, synthetic construct; identical to SEQ ID NO: 51746
  source 1..80: mol_type = other DNA

SEQ ID NO: 84847 - DNA, 80 bp, synthetic construct; identical to SEQ ID NO: 51747
  source 1..80: mol_type = other DNA

SEQ ID NO: 84848 - DNA, 80 bp, synthetic construct; identical to SEQ ID NO: 16771
  source 1..80: mol_type = other DNA

SEQ ID NO: 84849 - DNA, 80 bp, synthetic construct; identical to SEQ ID NO: 51749
  source 1..80: mol_type = other DNA

SEQ ID NO: 84850 - DNA, 80 bp, synthetic construct; identical to SEQ ID NO: 51750
  source 1..80: mol_type = other DNA

SEQ ID NO: 84851 - DNA, 80 bp, synthetic construct; identical to SEQ ID NO: 51751
  source 1..80: mol_type = other DNA

SEQ ID NO: 84852 - DNA, 80 bp, synthetic construct; identical to SEQ ID NO: 16772
  source 1..80: mol_type = other DNA

SEQ ID NO: 84853 - DNA, 80 bp, synthetic construct; identical to SEQ ID NO: 51753
  source 1..80: mol_type = other DNA

SEQ ID NO: 84854 - DNA, 80 bp, synthetic construct; identical to SEQ ID NO: 51754
  source 1..80: mol_type = other DNA

SEQ ID NO: 84855 - DNA, 80 bp, synthetic construct; identical to SEQ ID NO: 51755
  source 1..80: mol_type = other DNA

SEQ ID NO: 84856 - DNA, 80 bp, synthetic construct; identical to SEQ ID NO: 16773
  source 1..80: mol_type = other DNA

SEQ ID NO: 84857 - DNA, 80 bp, synthetic construct; identical to SEQ ID NO: 51757
  source 1..80: mol_type = other DNA

SEQ ID NO: 84858 - DNA, 80 bp, synthetic construct; identical to SEQ ID NO: 51758
  source 1..80: mol_type = other DNA

SEQ ID NO: 84859 - DNA, 80 bp, synthetic construct; identical to SEQ ID NO: 51759
  source 1..80: mol_type = other DNA

SEQ ID NO: 84860 - DNA, 80 bp, synthetic construct; identical to SEQ ID NO: 16774
  source 1..80: mol_type = other DNA

SEQ ID NO: 84861 - DNA, 80 bp, synthetic construct; identical to SEQ ID NO: 51761
  source 1..80: mol_type = other DNA

SEQ ID NO: 84862 - DNA, 80 bp, synthetic construct; identical to SEQ ID NO: 51762
  source 1..80: mol_type = other DNA

SEQ ID NO: 84863 - DNA, 80 bp, synthetic construct; identical to SEQ ID NO: 51763
  source 1..80: mol_type = other DNA

SEQ ID NO: 84864 - DNA, 80 bp, synthetic construct; identical to SEQ ID NO: 16775
  source 1..80: mol_type = other DNA

SEQ ID NO: 84865 - DNA, 80 bp, synthetic construct; identical to SEQ ID NO: 51765
  source 1..80: mol_type = other DNA

SEQ ID NO: 84866 - DNA, 80 bp, synthetic construct; identical to SEQ ID NO: 51766
  source 1..80: mol_type = other DNA

SEQ ID NO: 84867 - DNA, 80 bp, synthetic construct; identical to SEQ ID NO: 51767
  source 1..80: mol_type = other DNA

SEQ ID NO: 84868 - DNA, 80 bp, synthetic construct; identical to SEQ ID NO: 51768
  source 1..80: mol_type = other DNA

SEQ ID NO: 84869 - DNA, 80 bp, synthetic construct; identical to SEQ ID NO: 16776
  source 1..80: mol_type = other DNA

SEQ ID NO: 84870 - DNA, 80 bp, synthetic construct; identical to SEQ ID NO: 51770
  source 1..80: mol_type = other DNA

SEQ ID NO: 84871 - DNA, 80 bp, synthetic construct; identical to SEQ ID NO: 51771
  source 1..80: mol_type = other DNA

SEQ ID NO: 84872 - DNA, 80 bp, synthetic construct; identical to SEQ ID NO: 16777
  source 1..80: mol_type = other DNA

SEQ ID NO: 84873 - DNA, 80 bp, synthetic construct; identical to SEQ ID NO: 51773
  source 1..80: mol_type = other DNA

SEQ ID NO: 84874 - DNA, 80 bp, synthetic construct; identical to SEQ ID NO: 51774
  source 1..80: mol_type = other DNA

SEQ ID NO: 84875 - DNA, 80 bp, synthetic construct; identical to SEQ ID NO: 51775
  source 1..80: mol_type = other DNA

SEQ ID NO: 84876 - DNA, 80 bp, synthetic construct; identical to SEQ ID NO: 16778
  source 1..80: mol_type = other DNA

SEQ ID NO: 84877 - DNA, 80 bp, synthetic construct; identical to SEQ ID NO: 51777
  source 1..80: mol_type = other DNA

SEQ ID NO: 84878 - DNA, 80 bp, synthetic construct; identical to SEQ ID NO: 51778
  source 1..80: mol_type = other DNA

SEQ ID NO: 84879 - DNA, 80 bp, synthetic construct; identical to SEQ ID NO: 51779
  source 1..80: mol_type = other DNA

SEQ ID NO: 84880 - DNA, 80 bp, synthetic construct; identical to SEQ ID NO: 51780
  source 1..80: mol_type = other DNA

SEQ ID NO: 84881 - DNA, 80 bp, synthetic construct; identical to SEQ ID NO: 16779
  source 1..80: mol_type = other DNA

SEQ ID NO: 84882 - DNA, 80 bp, synthetic construct; identical to SEQ ID NO: 51782
  source 1..80: mol_type = other DNA

SEQ ID NO: 84883 - DNA, 80 bp, synthetic construct; identical to SEQ ID NO: 51783
  source 1..80: mol_type = other DNA

SEQ ID NO: 84884 - DNA, 80 bp, synthetic construct; identical to SEQ ID NO: 16780
  source 1..80: mol_type = other DNA

SEQ ID NO: 84885 - DNA, 80 bp, synthetic construct; identical to SEQ ID NO: 51785
  source 1..80: mol_type = other DNA

SEQ ID NO: 84886 - DNA, 80 bp, synthetic construct; identical to SEQ ID NO: 51786
  source 1..80: mol_type = other DNA

SEQ ID NO: 84887 - DNA, 80 bp, synthetic construct; identical to SEQ ID NO: 51787
  source 1..80: mol_type = other DNA

SEQ ID NO: 84888 - DNA, 80 bp, synthetic construct; identical to SEQ ID NO: 16781
  source 1..80: mol_type = other DNA

SEQ ID NO: 84889 - DNA, 80 bp, synthetic construct; identical to SEQ ID NO: 51789
  source 1..80: mol_type = other DNA

SEQ ID NO: 84890 - DNA, 80 bp, synthetic construct; identical to SEQ ID NO: 51791
  source 1..80: mol_type = other DNA

SEQ ID NO: 84891 - DNA, 80 bp, synthetic construct; identical to SEQ ID NO: 51792
  source 1..80: mol_type = other DNA

SEQ ID NO: 84892 - DNA, 80 bp, synthetic construct; identical to SEQ ID NO: 16782
  source 1..80: mol_type = other DNA

SEQ ID NO: 84893 - DNA, 80 bp, synthetic construct; identical to SEQ ID NO: 51794
  source 1..80: mol_type = other DNA

SEQ ID NO: 84894 - DNA, 80 bp, synthetic construct; identical to SEQ ID NO: 51795
  source 1..80: mol_type = other DNA

SEQ ID NO: 84895 - DNA, 80 bp, synthetic construct; identical to SEQ ID NO: 16783
  source 1..80: mol_type = other DNA

SEQ ID NO: 84896 - DNA, 80 bp, synthetic construct; identical to SEQ ID NO: 51797
  source 1..80: mol_type = other DNA

SEQ ID NO: 84897 - DNA, 80 bp, synthetic construct; identical to SEQ ID NO: 51798
  source 1..80: mol_type = other DNA

SEQ ID NO: 84898 - DNA, 80 bp, synthetic construct; identical to SEQ ID NO: 51799
  source 1..80: mol_type = other DNA

SEQ ID NO: 84899 - DNA, 80 bp, synthetic construct; identical to SEQ ID NO: 16784
  source 1..80: mol_type = other DNA

SEQ ID NO: 84900 - DNA, 80 bp, synthetic construct; identical to SEQ ID NO: 51801
  source 1..80: mol_type = other DNA

SEQ ID NO: 84901 - DNA, 80 bp, synthetic construct; identical to SEQ ID NO: 51802
  source 1..80: mol_type = other DNA

SEQ ID NO: 84902 - DNA, 80 bp, synthetic construct; identical to SEQ ID NO: 51803
  source 1..80: mol_type = other DNA

SEQ ID NO: 84903 - DNA, 80 bp, synthetic construct; identical to SEQ ID NO: 16785
  source 1..80: mol_type = other DNA

SEQ ID NO: 84904 - DNA, 80 bp, synthetic construct; identical to SEQ ID NO: 51805
  source 1..80: mol_type = other DNA

SEQ ID NO: 84905 - DNA, 80 bp, synthetic construct; identical to SEQ ID NO: 51806
  source 1..80: mol_type = other DNA

SEQ ID NO: 84906 - DNA, 80 bp, synthetic construct; identical to SEQ ID NO: 51807
  source 1..80: mol_type = other DNA

SEQ ID NO: 84907 - DNA, 80 bp, synthetic construct; identical to SEQ ID NO: 51808
  source 1..80: mol_type = other DNA

SEQ ID NO: 84908 - DNA, 80 bp, synthetic construct; identical to SEQ ID NO: 16786
  source 1..80: mol_type = other DNA

SEQ ID NO: 84909 - DNA, 80 bp, synthetic construct; identical to SEQ ID NO: 51810
  source 1..80: mol_type = other DNA

SEQ ID NO: 84910 - DNA, 80 bp, synthetic construct; identical to SEQ ID NO: 51811
  source 1..80: mol_type = other DNA

SEQ ID NO: 84911 - DNA, 80 bp, synthetic construct; identical to SEQ ID NO: 16787
  source 1..80: mol_type = other DNA

SEQ ID NO: 84912 - DNA, 80 bp, synthetic construct; identical to SEQ ID NO: 51813
  source 1..80: mol_type = other DNA

SEQ ID NO: 84913 - DNA, 80 bp, synthetic construct; identical to SEQ ID NO: 51814
  source 1..80: mol_type = other DNA

SEQ ID NO: 84914 - DNA, 80 bp, synthetic construct; identical to SEQ ID NO: 51815
  source 1..80: mol_type = other DNA

SEQ ID NO: 84915 - DNA, 80 bp, synthetic construct; identical to SEQ ID NO: 16788
  source 1..80: mol_type = other DNA

SEQ ID NO: 84916 - DNA, 80 bp, synthetic construct; identical to SEQ ID NO: 51817
  source 1..80: mol_type = other DNA

SEQ ID NO: 84917 - DNA, 80 bp, synthetic construct; identical to SEQ ID NO: 51818
  source 1..80: mol_type = other DNA

SEQ ID NO: 84918 - DNA, 80 bp, synthetic construct; identical to SEQ ID NO: 51819
  source 1..80: mol_type = other DNA

SEQ ID NO: 84919 - DNA, 80 bp, synthetic construct; identical to SEQ ID NO: 16789
  source 1..80: mol_type = other DNA

SEQ ID NO: 84920 - DNA, 80 bp, synthetic construct; identical to SEQ ID NO: 51821
  source 1..80: mol_type = other DNA

SEQ ID NO: 84921 - DNA, 80 bp, synthetic construct; identical to SEQ ID NO: 51822
  source 1..80: mol_type = other DNA

SEQ ID NO: 84922 - DNA, 80 bp, synthetic construct; identical to SEQ ID NO: 51823
  source 1..80: mol_type = other DNA

SEQ ID NO: 84923 - DNA, 80 bp, synthetic construct; identical to SEQ ID NO: 16790
  source 1..80: mol_type = other DNA

SEQ ID NO: 84924 - DNA, 80 bp, synthetic construct; identical to SEQ ID NO: 51825
  source 1..80: mol_type = other DNA

SEQ ID NO: 84925 - DNA, 80 bp, synthetic construct; identical to SEQ ID NO: 51826
  source 1..80: mol_type = other DNA

SEQ ID NO: 84926 - DNA, 80 bp, synthetic construct; identical to SEQ ID NO: 51827
  source 1..80: mol_type = other DNA

SEQ ID NO: 84927 - DNA, 80 bp, synthetic construct; identical to SEQ ID NO: 51828
  source 1..80: mol_type = other DNA

SEQ ID NO: 84928 - DNA, 80 bp, synthetic construct; identical to SEQ ID NO: 16791
  source 1..80: mol_type = other DNA

SEQ ID NO: 84929 - DNA, 80 bp, synthetic construct; identical to SEQ ID NO: 51830
  source 1..80: mol_type = other DNA

SEQ ID NO: 84930 - DNA, 80 bp, synthetic construct; identical to SEQ ID NO: 51831
  source 1..80: mol_type = other DNA

SEQ ID NO: 84931 - DNA, 80 bp, synthetic construct; identical to SEQ ID NO: 16792
  source 1..80: mol_type = other DNA

SEQ ID NO: 84932 - DNA, 80 bp, synthetic construct; identical to SEQ ID NO: 51833
  source 1..80: mol_type = other DNA

SEQ ID NO: 84933 - DNA, 80 bp, synthetic construct; identical to SEQ ID NO: 51834
  source 1..80: mol_type = other DNA

SEQ ID NO: 84934 - DNA, 80 bp, synthetic construct; identical to SEQ ID NO: 51835
  source 1..80: mol_type = other DNA

SEQ ID NO: 84935 - DNA, 80 bp, synthetic construct; identical to SEQ ID NO: 16793
  source 1..80: mol_type = other DNA

SEQ ID NO: 84936 - DNA, 80 bp, synthetic construct; identical to SEQ ID NO: 51837
  source 1..80: mol_type = other DNA

SEQ ID NO: 84937 - DNA, 80 bp, synthetic construct; identical to SEQ ID NO: 51838
  source 1..80: mol_type = other DNA

SEQ ID NO: 84938 - DNA, 80 bp, synthetic construct; identical to SEQ ID NO: 51839
  source 1..80: mol_type = other DNA

SEQ ID NO: 84939 - DNA, 80 bp, synthetic construct; identical to SEQ ID NO: 16794
  source 1..80: mol_type = other DNA

SEQ ID NO: 84940 - DNA, 80 bp, synthetic construct; identical to SEQ ID NO: 51841
  source 1..80: mol_type = other DNA

SEQ ID NO: 84941 - DNA, 80 bp, synthetic construct; identical to SEQ ID NO: 51842
  source 1..80: mol_type = other DNA

SEQ ID NO: 84942 - DNA, 80 bp, synthetic construct; identical to SEQ ID NO: 51843
  source 1..80: mol_type = other DNA

SEQ ID NO: 84943 - DNA, 80 bp, synthetic construct; identical to SEQ ID NO: 51844
  source 1..80: mol_type = other DNA

SEQ ID NO: 84944 - DNA, 80 bp, synthetic construct; identical to SEQ ID NO: 16795
  source 1..80: mol_type = other DNA

SEQ ID NO: 84945 - DNA, 80 bp, synthetic construct; identical to SEQ ID NO: 51846
  source 1..80: mol_type = other DNA

SEQ ID NO: 84946 - DNA, 80 bp, synthetic construct; identical to SEQ ID NO: 51847
  source 1..80: mol_type = other DNA

SEQ ID NO: 84947 - DNA, 80 bp, synthetic construct; identical to SEQ ID NO: 16796
  source 1..80: mol_type = other DNA

SEQ ID NO: 84948 - DNA, 80 bp, synthetic construct; identical to SEQ ID NO: 51849
  source 1..80: mol_type = other DNA

SEQ ID NO: 84949 - DNA, 80 bp, synthetic construct; identical to SEQ ID NO: 51850
  source 1..80: mol_type = other DNA

SEQ ID NO: 84950 - DNA, 80 bp, synthetic construct; identical to SEQ ID NO: 51851
  source 1..80: mol_type = other DNA

SEQ ID NO: 84951 - DNA, 80 bp, synthetic construct; identical to SEQ ID NO: 16797
  source 1..80: mol_type = other DNA

SEQ ID NO: 84952 - DNA, 80 bp, synthetic construct; identical to SEQ ID NO: 51853
  source 1..80: mol_type = other DNA

SEQ ID NO: 84953 - DNA, 80 bp, synthetic construct; identical to SEQ ID NO: 51854
  source 1..80: mol_type = other DNA

SEQ ID NO: 84954 - DNA, 80 bp, synthetic construct; identical to SEQ ID NO: 51855
  source 1..80: mol_type = other DNA

SEQ ID NO: 84955 - DNA, 80 bp, synthetic construct; identical to SEQ ID NO: 51856
  source 1..80: mol_type = other DNA

SEQ ID NO: 84956 - DNA, 80 bp, synthetic construct; identical to SEQ ID NO: 16798
  source 1..80: mol_type = other DNA

SEQ ID NO: 84957 - DNA, 80 bp, synthetic construct; identical to SEQ ID NO: 51858
  source 1..80: mol_type = other DNA

SEQ ID NO: 84958 - DNA, 80 bp, synthetic construct; identical to SEQ ID NO: 51859
  source 1..80: mol_type = other DNA

SEQ ID NO: 84959 - DNA, 80 bp, synthetic construct; identical to SEQ ID NO: 51860
  source 1..80: mol_type = other DNA

SEQ ID NO: 84960 - DNA, 80 bp, synthetic construct; identical to SEQ ID NO: 16799
  source 1..80: mol_type = other DNA

SEQ ID NO: 84961 - DNA, 80 bp, synthetic construct; identical to SEQ ID NO: 51862
  source 1..80: mol_type = other DNA

SEQ ID NO: 84962 - DNA, 80 bp, synthetic construct; identical to SEQ ID NO: 51863
  source 1..80: mol_type = other DNA

SEQ ID NO: 84963 - DNA, 80 bp, synthetic construct; identical to SEQ ID NO: 51864
  source 1..80: mol_type = other DNA

SEQ ID NO: 84964 - DNA, 80 bp, synthetic construct; identical to SEQ ID NO: 16800
  source 1..80: mol_type = other DNA

SEQ ID NO: 84965 - DNA, 80 bp, synthetic construct; identical to SEQ ID NO: 51866
  source 1..80: mol_type = other DNA

SEQ ID NO: 84966 - DNA, 80 bp, synthetic construct; identical to SEQ ID NO: 51867
  source 1..80: mol_type = other DNA

SEQ ID NO: 84967 - DNA, 80 bp, synthetic construct; identical to SEQ ID NO: 51868
  source 1..80: mol_type = other DNA

SEQ ID NO: 84968 - DNA, 80 bp, synthetic construct; identical to SEQ ID NO: 16801
  source 1..80: mol_type = other DNA

SEQ ID NO: 84969 - DNA, 80 bp, synthetic construct; identical to SEQ ID NO: 51870
  source 1..80: mol_type = other DNA

SEQ ID NO: 84970 - DNA, 80 bp, synthetic construct; identical to SEQ ID NO: 51871
  source 1..80: mol_type = other DNA

SEQ ID NO: 84971 - DNA, 80 bp, synthetic construct; identical to SEQ ID NO: 51872
  source 1..80: mol_type = other DNA

SEQ ID NO: 84972 - DNA, 80 bp, synthetic construct; identical to SEQ ID NO: 16802
  source 1..80: mol_type = other DNA

SEQ ID NO: 84973 - DNA, 80 bp, synthetic construct; identical to SEQ ID NO: 51874
  source 1..80: mol_type = other DNA

SEQ ID NO: 84974 - DNA, 80 bp, synthetic construct; identical to SEQ ID NO: 51875
  source 1..80: mol_type = other DNA

SEQ ID NO: 84975 - DNA, 80 bp, synthetic construct; identical to SEQ ID NO: 16803
  source 1..80: mol_type = other DNA

SEQ ID NO: 84976 - DNA, 80 bp, synthetic construct; identical to SEQ ID NO: 51877
  source 1..80: mol_type = other DNA

SEQ ID NO: 84977 - DNA, 80 bp, synthetic construct; identical to SEQ ID NO: 51878
  source 1..80: mol_type = other DNA

SEQ ID NO: 84978 - DNA, 80 bp, synthetic construct; identical to SEQ ID NO: 51879
  source 1..80: mol_type = other DNA

SEQ ID NO: 84979 - DNA, 80 bp, synthetic construct; identical to SEQ ID NO: 51880
  source 1..80: mol_type = other DNA

SEQ ID NO: 84980 - DNA, 80 bp, synthetic construct; identical to SEQ ID NO: 16804
  source 1..80: mol_type = other DNA

SEQ ID NO: 84981 - DNA, 80 bp, synthetic construct; identical to SEQ ID NO: 51882
  source 1..80: mol_type = other DNA

SEQ ID NO: 84982 - DNA, 80 bp, synthetic construct; identical to SEQ ID NO: 51883
  source 1..80: mol_type = other DNA

SEQ ID NO: 84983 - DNA, 80 bp, synthetic construct; identical to SEQ ID NO: 16805
  source 1..80: mol_type = other DNA

SEQ ID NO: 84984 - DNA, 80 bp, synthetic construct; identical to SEQ ID NO: 51885
  source 1..80: mol_type = other DNA

SEQ ID NO: 84985 - DNA, 80 bp, synthetic construct; identical to SEQ ID NO: 51886
  source 1..80: mol_type = other DNA

SEQ ID NO: 84986 - DNA, 80 bp, synthetic construct; identical to SEQ ID NO: 51887
  source 1..80: mol_type = other DNA

SEQ ID NO: 84987 - DNA, 80 bp, synthetic construct; identical to SEQ ID NO: 51888
  source 1..80: mol_type = other DNA

SEQ ID NO: 84988 - DNA, 80 bp, synthetic construct; identical to SEQ ID NO: 16806
  source 1..80: mol_type = other DNA

SEQ ID NO: 84989 - DNA, 80 bp, synthetic construct; identical to SEQ ID NO: 51890
  source 1..80: mol_type = other DNA

SEQ ID NO: 84990 - DNA, 80 bp, synthetic construct; identical to SEQ ID NO: 51891
  source 1..80: mol_type = other DNA

SEQ ID NO: 84991 - DNA, 80 bp, synthetic construct; identical to SEQ ID NO: 16807
  source 1..80: mol_type = other DNA

SEQ ID NO: 84992 - DNA, 80 bp, synthetic construct; identical to SEQ ID NO: 51894
  source 1..80: mol_type = other DNA

SEQ ID NO: 84993 - DNA, 80 bp, synthetic construct; identical to SEQ ID NO: 51895
  source 1..80: mol_type = other DNA

SEQ ID NO: 84994 - DNA, 80 bp, synthetic construct; identical to SEQ ID NO: 16808
  source 1..80: mol_type = other DNA

SEQ ID NO: 84995 - DNA, 80 bp, synthetic construct; identical to SEQ ID NO: 51897
  source 1..80: mol_type = other DNA

SEQ ID NO: 84996 - DNA, 80 bp, synthetic construct; identical to SEQ ID NO: 51898
  source 1..80: mol_type = other DNA

SEQ ID NO: 84997 - DNA, 80 bp, synthetic construct; identical to SEQ ID NO: 51899
  source 1..80: mol_type = other DNA

SEQ ID NO: 84998 - DNA, 80 bp, synthetic construct; identical to SEQ ID NO: 16809
  source 1..80: mol_type = other DNA

SEQ ID NO: 84999 - DNA, 80 bp, synthetic construct; identical to SEQ ID NO: 51901
  source 1..80: mol_type = other DNA

SEQ ID NO: 85000 - DNA, 80 bp, synthetic construct; identical to SEQ ID NO: 51902
  source 1..80: mol_type = other DNA

SEQ ID NO: 85001 - DNA, 80 bp, synthetic construct; identical to SEQ ID NO: 51903
  source 1..80: mol_type = other DNA

SEQ ID NO: 85002 - DNA, 80 bp, synthetic construct; identical to SEQ ID NO: 16810
  source 1..80: mol_type = other DNA

SEQ ID NO: 85003 - DNA, 80 bp, synthetic construct; identical to SEQ ID NO: 51906
  source 1..80: mol_type = other DNA

SEQ ID NO: 85004 - DNA, 80 bp, synthetic construct; identical to SEQ ID NO: 16811
  source 1..80: mol_type = other DNA

SEQ ID NO: 85005 - DNA, 80 bp, synthetic construct; identical to SEQ ID NO: 51909
  source 1..80: mol_type = other DNA

SEQ ID NO: 85006 - DNA, 80 bp, synthetic construct; identical to SEQ ID NO: 51910
  source 1..80: mol_type = other DNA

SEQ ID NO: 85007 - DNA, 80 bp, synthetic construct; identical to SEQ ID NO: 51912
  source 1..80: mol_type = other DNA

SEQ ID NO: 85008 - DNA, 80 bp, synthetic construct; identical to SEQ ID NO: 16812
  source 1..80: mol_type = other DNA

SEQ ID NO: 85009 - DNA, 80 bp, synthetic construct; identical to SEQ ID NO: 51914
  source 1..80: mol_type = other DNA

SEQ ID NO: 85010 - DNA, 80 bp, synthetic construct; identical to SEQ ID NO: 51915
  source 1..80: mol_type = other DNA

SEQ ID NO: 85011 - DNA, 80 bp, synthetic construct; identical to SEQ ID NO: 16813
  source 1..80: mol_type = other DNA

SEQ ID NO: 85012 - DNA, 80 bp, synthetic construct; identical to SEQ ID NO: 51917
  source 1..80: mol_type = other DNA

SEQ ID NO: 85013 - DNA, 80 bp, synthetic construct; identical to SEQ ID NO: 51918
  source 1..80: mol_type = other DNA

SEQ ID NO: 85014 - DNA, 80 bp, synthetic construct; identical to SEQ ID NO: 51919
  source 1..80: mol_type = other DNA

SEQ ID NO: 85015 - DNA, 80 bp, synthetic construct; identical to SEQ ID NO: 51920
  source 1..80: mol_type = other DNA

SEQ ID NO: 85016 - DNA, 80 bp, synthetic construct; identical to SEQ ID NO: 16814
  source 1..80: mol_type = other DNA

SEQ ID NO: 85017 - DNA, 80 bp, synthetic construct; identical to SEQ ID NO: 51922
  source 1..80: mol_type = other DNA

SEQ ID NO: 85018 - DNA, 80 bp, synthetic construct; identical to SEQ ID NO: 51923
  source 1..80: mol_type = other DNA

SEQ ID NO: 85019 - DNA, 80 bp, synthetic construct; identical to SEQ ID NO: 16815
  source 1..80: mol_type = other DNA

SEQ ID NO: 85020 - DNA, 80 bp, synthetic construct; identical to SEQ ID NO: 51925
  source 1..80: mol_type = other DNA

SEQ ID NO: 85021 - DNA, 80 bp, synthetic construct; identical to SEQ ID NO: 51926
  source 1..80: mol_type = other DNA

SEQ ID NO: 85022 - DNA, 80 bp, synthetic construct; identical to SEQ ID NO: 51927
  source 1..80: mol_type = other DNA

SEQ ID NO: 85023 - DNA, 80 bp, synthetic construct; identical to SEQ ID NO: 51928
  source 1..80: mol_type = other DNA

SEQ ID NO: 85024 - DNA, 80 bp, synthetic construct; identical to SEQ ID NO: 16816
  source 1..80: mol_type = other DNA

SEQ ID NO: 85025 - DNA, 80 bp, synthetic construct; identical to SEQ ID NO: 51930
  source 1..80: mol_type = other DNA

SEQ ID NO: 85026 - DNA, 80 bp, synthetic construct; identical to SEQ ID NO: 51931
  source 1..80: mol_type = other DNA

SEQ ID NO: 85027 - DNA, 80 bp, synthetic construct; identical to SEQ ID NO: 51932
  source 1..80: mol_type = other DNA

SEQ ID NO: 85028 - DNA, 80 bp, synthetic construct; identical to SEQ ID NO: 16817
  source 1..80: mol_type = other DNA

SEQ ID NO: 85029 - DNA, 80 bp, synthetic construct; identical to SEQ ID NO: 51934
  source 1..80: mol_type = other DNA

SEQ ID NO: 85030 - DNA, 80 bp, synthetic construct; identical to SEQ ID NO: 51935
  source 1..80: mol_type = other DNA

SEQ ID NO: 85031 - DNA, 80 bp, synthetic construct; identical to SEQ ID NO: 51936
  source 1..80: mol_type = other DNA

SEQ ID NO: 85032 - DNA, 80 bp, synthetic construct; identical to SEQ ID NO: 16818
  source 1..80: mol_type = other DNA

SEQ ID NO: 85033 - DNA, 80 bp, synthetic construct; identical to SEQ ID NO: 51938
  source 1..80: mol_type = other DNA

SEQ ID NO: 85034 - DNA, 80 bp, synthetic construct; identical to SEQ ID NO: 51939
  source 1..80: mol_type = other DNA

SEQ ID NO: 85035 - DNA, 80 bp, synthetic construct; identical to SEQ ID NO: 16819
  source 1..80: mol_type = other DNA

SEQ ID NO: 85036 - DNA, 80 bp, synthetic construct; identical to SEQ ID NO: 51941
  source 1..80: mol_type = other DNA

SEQ ID NO: 85037 - DNA, 80 bp, synthetic construct; identical to SEQ ID NO: 51942
  source 1..80: mol_type = other DNA

SEQ ID NO: 85038 - DNA, 80 bp, synthetic construct; identical to SEQ ID NO: 51943
  source 1..80: mol_type = other DNA

SEQ ID NO: 85039 - DNA, 80 bp, synthetic construct; identical to SEQ ID NO: 51944
  source 1..80: mol_type = other DNA

SEQ ID NO: 85040 - DNA, 80 bp, synthetic construct; identical to SEQ ID NO: 16820
  source 1..80: mol_type = other DNA

SEQ ID NO: 85041 - DNA, 80 bp, synthetic construct; identical to SEQ ID NO: 51946
  source 1..80: mol_type = other DNA

SEQ ID NO: 85042 - DNA, 80 bp, synthetic construct; identical to SEQ ID NO: 51947
  source 1..80: mol_type = other DNA

SEQ ID NO: 85043 - DNA, 80 bp, synthetic construct; identical to SEQ ID NO: 51948
  source 1..80: mol_type = other DNA

SEQ ID NO: 85044 - DNA, 80 bp, synthetic construct; identical to SEQ ID NO: 16821
  source 1..80: mol_type = other DNA

SEQ ID NO: 85045 - DNA, 80 bp, synthetic construct; identical to SEQ ID NO: 51950
  source 1..80: mol_type = other DNA

SEQ ID NO: 85046 - DNA, 80 bp, synthetic construct; identical to SEQ ID NO: 51951
  source 1..80: mol_type = other DNA

SEQ ID NO: 85047 - DNA, 80 bp, synthetic construct; identical to SEQ ID NO: 16822
  source 1..80: mol_type = other DNA

SEQ ID NO: 85048 - DNA, 80 bp, synthetic construct; identical to SEQ ID NO: 51954
  source 1..80: mol_type = other DNA

SEQ ID NO: 85049 - DNA, 80 bp, synthetic construct; identical to SEQ ID NO: 51955
  source 1..80: mol_type = other DNA

SEQ ID NO: 85050 - DNA, 80 bp, synthetic construct; identical to SEQ ID NO: 16823
  source 1..80: mol_type = other DNA

SEQ ID NO: 85051 - DNA, 80 bp, synthetic construct; identical to SEQ ID NO: 51957
  source 1..80: mol_type = other DNA

SEQ ID NO: 85052 - DNA, 80 bp, synthetic construct; identical to SEQ ID NO: 51958
  source 1..80: mol_type = other DNA

SEQ ID NO: 85053 - DNA, 80 bp, synthetic construct; identical to SEQ ID NO: 51959
  source 1..80: mol_type = other DNA

SEQ ID NO: 85054 - DNA, 80 bp, synthetic construct; identical to SEQ ID NO: 16824
  source 1..80: mol_type = other DNA

SEQ ID NO: 85055 - DNA, 80 bp, synthetic construct; identical to SEQ ID NO: 51961
  source 1..80: mol_type = other DNA

SEQ ID NO: 85056 - DNA, 80 bp, synthetic construct; identical to SEQ ID NO: 51962
  source 1..80: mol_type = other DNA

SEQ ID NO: 85057 - DNA, 80 bp, synthetic construct; identical to SEQ ID NO: 51963
  source 1..80: mol_type = other DNA

SEQ ID NO: 85058 - DNA, 80 bp, synthetic construct; identical to SEQ ID NO: 16825
  source 1..80: mol_type = other DNA

SEQ ID NO: 85059 - DNA, 80 bp, synthetic construct; identical to SEQ ID NO: 51965
  source 1..80: mol_type = other DNA

SEQ ID NO: 85060 - DNA, 80 bp, synthetic construct; identical to SEQ ID NO: 51966
  source 1..80: mol_type = other DNA

SEQ ID NO: 85061 - DNA, 80 bp, synthetic construct; identical to SEQ ID NO: 51967
  source 1..80: mol_type = other DNA

SEQ ID NO: 85062 - DNA, 80 bp, synthetic construct; identical to SEQ ID NO: 16826
  source 1..80: mol_type = other DNA

SEQ ID NO: 85063 - DNA, 80 bp, synthetic construct; identical to SEQ ID NO: 51969
  source 1..80: mol_type = other DNA

SEQ ID NO: 85064 - DNA, 80 bp, synthetic construct; identical to SEQ ID NO: 51970
  source 1..80: mol_type = other DNA

SEQ ID NO: 85065 - DNA, 80 bp, synthetic construct; identical to SEQ ID NO: 51971
  source 1..80: mol_type = other DNA

SEQ ID NO: 85066 - DNA, 80 bp, synthetic construct; identical to SEQ ID NO: 51972
  source 1..80: mol_type = other DNA

SEQ ID NO: 85067 - DNA, 80 bp, synthetic construct; identical to SEQ ID NO: 16827
  source 1..80: mol_type = other DNA

SEQ ID NO: 85068 - DNA, 80 bp, synthetic construct; identical to SEQ ID NO: 51974
  source 1..80: mol_type = other DNA

SEQ ID NO: 85069 - DNA, 80 bp, synthetic construct; identical to SEQ ID NO: 51975
  source 1..80: mol_type = other DNA

SEQ ID NO: 85070 - DNA, 80 bp, synthetic construct; identical to SEQ ID NO: 16828
  source 1..80: mol_type = other DNA

SEQ ID NO: 85071 - DNA, 80 bp, synthetic construct; identical to SEQ ID NO: 51977
  source 1..80: mol_type = other DNA

SEQ ID NO: 85072 - DNA, 80 bp, synthetic construct; identical to SEQ ID NO: 51978
  source 1..80: mol_type = other DNA

SEQ ID NO: 85073 - DNA, 80 bp, synthetic construct; identical to SEQ ID NO: 51979
  source 1..80: mol_type = other DNA

SEQ ID NO: 85074 - DNA, 80 bp, synthetic construct; identical to SEQ ID NO: 16829
  source 1..80: mol_type = other DNA

SEQ ID NO: 85075 - DNA, 80 bp, synthetic construct; identical to SEQ ID NO: 51981
  source 1..80: mol_type = other DNA

SEQ ID NO: 85076 - DNA, 80 bp, synthetic construct; identical to SEQ ID NO: 51982
  source 1..80: mol_type = other DNA

SEQ ID NO: 85077 - DNA, 80 bp, synthetic construct; identical to SEQ ID NO: 51983
  source 1..80: mol_type = other DNA

SEQ ID NO: 85078 - DNA, 80 bp, synthetic construct; identical to SEQ ID NO: 51984
  source 1..80: mol_type = other DNA

SEQ ID NO: 85079 - DNA, 80 bp, synthetic construct; identical to SEQ ID NO: 16830
  source 1..80: mol_type = other DNA

SEQ ID NO: 85080 - DNA, 80 bp, synthetic construct; identical to SEQ ID NO: 51986
  source 1..80: mol_type = other DNA

SEQ ID NO: 85081 - DNA, 80 bp, synthetic construct; identical to SEQ ID NO: 16831
  source 1..80: mol_type = other DNA

SEQ ID NO: 85082 - DNA, 80 bp, synthetic construct; identical to SEQ ID NO: 51989
  source 1..80: mol_type = other DNA

SEQ ID NO: 85083 - DNA, 80 bp, synthetic construct; identical to SEQ ID NO: 51990
  source 1..80: mol_type = other DNA

SEQ ID NO: 85084 - DNA, 80 bp, synthetic construct; identical to SEQ ID NO: 51991
  source 1..80: mol_type = other DNA

SEQ ID NO: 85085 - DNA, 80 bp, synthetic construct; identical to SEQ ID NO: 16832
  source 1..80: mol_type = other DNA

SEQ ID NO: 85086 - DNA, 80 bp, synthetic construct; identical to SEQ ID NO: 51994
  source 1..80: mol_type = other DNA

SEQ ID NO: 85087 - DNA, 80 bp, synthetic construct; identical to SEQ ID NO: 51995
  source 1..80: mol_type = other DNA

SEQ ID NO: 85088 - DNA, 80 bp, synthetic construct; identical to SEQ ID NO: 51996
  source 1..80: mol_type = other DNA

SEQ ID NO: 85089 - DNA, 80 bp, synthetic construct; identical to SEQ ID NO: 16833
  source 1..80: mol_type = other DNA

SEQ ID NO: 85090 - DNA, 80 bp, synthetic construct; identical to SEQ ID NO: 51998
  source 1..80: mol_type = other DNA

SEQ ID NO: 85091 - DNA, 80 bp, synthetic construct; identical to SEQ ID NO: 51999
  source 1..80: mol_type = other DNA

SEQ ID NO: 85092 - DNA, 80 bp, synthetic construct; identical to SEQ ID NO: 52000
  source 1..80: mol_type = other DNA

SEQ ID NO: 85093 - DNA, 80 bp, synthetic construct; identical to SEQ ID NO: 16834
  source 1..80: mol_type = other DNA

SEQ ID NO: 85094 - DNA, 80 bp, synthetic construct; identical to SEQ ID NO: 52002
  source 1..80: mol_type = other DNA

SEQ ID NO: 85095 - DNA, 80 bp, synthetic construct; identical to SEQ ID NO: 52003
  source 1..80: mol_type = other DNA

SEQ ID NO: 85096 - DNA, 80 bp, synthetic construct; identical to SEQ ID NO: 52004
  source 1..80: mol_type = other DNA

SEQ ID NO: 85097 - DNA, 80 bp, synthetic construct; identical to SEQ ID NO: 16835
  source 1..80: mol_type = other DNA

SEQ ID NO: 85098 - DNA, 80 bp, synthetic construct; identical to SEQ ID NO: 52006
  source 1..80: mol_type = other DNA

SEQ ID NO: 85099 - DNA, 80 bp, synthetic construct; identical to SEQ ID NO: 52007
  source 1..80: mol_type = other DNA

SEQ ID NO: 85100 - DNA, 80 bp, synthetic construct; identical to SEQ ID NO: 52008
  source 1..80: mol_type = other DNA

SEQ ID NO: 85101 - DNA, 80 bp, synthetic construct; identical to SEQ ID NO: 16836
  source 1..80: mol_type = other DNA

SEQ ID NO: 85102 - DNA, 80 bp, synthetic construct; identical to SEQ ID NO: 52010
  source 1..80: mol_type = other DNA

SEQ ID NO: 85103 - DNA, 80 bp, synthetic construct; identical to SEQ ID NO: 52011
  source 1..80: mol_type = other DNA

SEQ ID NO: 85104 - DNA, 80 bp, synthetic construct; identical to SEQ ID NO: 52012
  source 1..80: mol_type = other DNA

SEQ ID NO: 85105 - DNA, 80 bp, synthetic construct; identical to SEQ ID NO: 16837
  source 1..80: mol_type = other DNA

SEQ ID NO: 85106 - DNA, 80 bp, synthetic construct; identical to SEQ ID NO: 52014
  source 1..80: mol_type = other DNA

SEQ ID NO: 85107 - DNA, 80 bp, synthetic construct; identical to SEQ ID NO: 52015
  source 1..80: mol_type = other DNA

SEQ ID NO: 85108 - DNA, 80 bp, synthetic construct; identical to SEQ ID NO: 16838
  source 1..80: mol_type = other DNA

SEQ ID NO: 85109 - DNA, 80 bp, synthetic construct; identical to SEQ ID NO: 52017
  source 1..80: mol_type = other DNA

SEQ ID NO: 85110 - DNA, 80 bp, synthetic construct; identical to SEQ ID NO: 52018
  source 1..80: mol_type = other DNA

SEQ ID NO: 85111 - DNA, 80 bp, synthetic construct; identical to SEQ ID NO: 52019
  source 1..80: mol_type = other DNA

SEQ ID NO: 85112 - DNA, 80 bp, synthetic construct; identical to SEQ ID NO: 16839
  source 1..80: mol_type = other DNA

SEQ ID NO: 85113 - DNA, 80 bp, synthetic construct; identical to SEQ ID NO: 52021
  source 1..80: mol_type = other DNA

SEQ ID NO: 85114 - DNA, 80 bp, synthetic construct; identical to SEQ ID NO: 52022
  source 1..80: mol_type = other DNA

SEQ ID NO: 85115 - DNA, 80 bp, synthetic construct; identical to SEQ ID NO: 52023
  source 1..80: mol_type = other DNA

SEQ ID NO: 85116 - DNA, 80 bp, synthetic construct; identical to SEQ ID NO: 52024
  source 1..80: mol_type = other DNA

SEQ ID NO: 85117 - DNA, 80 bp, synthetic construct; identical to SEQ ID NO: 16840
  source 1..80: mol_type = other DNA

SEQ ID NO: 85118 - DNA, 80 bp, synthetic construct; identical to SEQ ID NO: 52026
  source 1..80: mol_type = other DNA

SEQ ID NO: 85119 - DNA, 80 bp, synthetic construct; identical to SEQ ID NO: 52027
  source 1..80: mol_type = other DNA

SEQ ID NO: 85120 - DNA, 80 bp, synthetic construct; identical to SEQ ID NO: 52028
  source 1..80: mol_type = other DNA

SEQ ID NO: 85121 - DNA, 80 bp, synthetic construct; identical to SEQ ID NO: 16841
  source 1..80: mol_type = other DNA

SEQ ID NO: 85122 - DNA, 80 bp, synthetic construct; identical to SEQ ID NO: 52030
  source 1..80: mol_type = other DNA

SEQ ID NO: 85123 - DNA, 80 bp, synthetic construct; identical to SEQ ID NO: 52031
  source 1..80: mol_type = other DNA

SEQ ID NO: 85124 - DNA, 80 bp, synthetic construct; identical to SEQ ID NO: 16842
  source 1..80: mol_type = other DNA

SEQ ID NO: 85125 - DNA, 80 bp, synthetic construct; identical to SEQ ID NO: 52033
  source 1..80: mol_type = other DNA

SEQ ID NO: 85126 - DNA, 80 bp, synthetic construct; identical to SEQ ID NO: 52035
  source 1..80: mol_type = other DNA

SEQ ID NO: 85127 - DNA, 80 bp, synthetic construct; identical to SEQ ID NO: 16843
  source 1..80: mol_type = other DNA

SEQ ID NO: 85128 - DNA, 80 bp, synthetic construct; identical to SEQ ID NO: 52037
  source 1..80: mol_type = other DNA

SEQ ID NO: 85129 - DNA, 80 bp, synthetic construct; identical to SEQ ID NO: 52038
  source 1..80: mol_type = other DNA

SEQ ID NO: 85130 - DNA, 80 bp, synthetic construct; identical to SEQ ID NO: 52039
  source 1..80: mol_type = other DNA

SEQ ID NO: 85131 - DNA, 80 bp, synthetic construct; identical to SEQ ID NO: 16844
  source 1..80: mol_type = other DNA

SEQ ID NO: 85132 - DNA, 80 bp, synthetic construct; identical to SEQ ID NO: 52041
  source 1..80: mol_type = other DNA

SEQ ID NO: 85133 - DNA, 80 bp, synthetic construct; identical to SEQ ID NO: 52042
  source 1..80: mol_type = other DNA

SEQ ID NO: 85134 - DNA, 80 bp, synthetic construct; identical to SEQ ID NO: 16845
  source 1..80: mol_type = other DNA

SEQ ID NO: 85135 - DNA, 80 bp, synthetic construct; identical to SEQ ID NO: 52045
  source 1..80: mol_type = other DNA

SEQ ID NO: 85136 - DNA, 80 bp, synthetic construct; identical to SEQ ID NO: 52046
  source 1..80: mol_type = other DNA

SEQ ID NO: 85137 - DNA, 80 bp, synthetic construct; identical to SEQ ID NO: 52047
  source 1..80: mol_type = other DNA

SEQ ID NO: 85138 - DNA, 80 bp, synthetic construct; identical to SEQ ID NO: 16846
  source 1..80: mol_type = other DNA

SEQ ID NO: 85139 - DNA, 80 bp, synthetic construct; identical to SEQ ID NO: 52050
  source 1..80: mol_type = other DNA

SEQ ID NO: 85140 - DNA, 80 bp, synthetic construct; identical to SEQ ID NO: 52051
  source 1..80: mol_type = other DNA

SEQ ID NO: 85141 - DNA, 80 bp, synthetic construct; identical to SEQ ID NO: 16847
  source 1..80: mol_type = other DNA
